(19) United States
(12) Patent Application Publication
(10) Pub. No.: US 2016/0201099 A1
(43) Pub. Date: Jul. 14, 2016

(54) CHIMERIC NON-RIBOSOMAL PEPTIDE SYNTHETASE

(71) Applicant: Dow AgroSciences LLC, Indianapolis, IN (US)

(72) Inventors: Amudhan VENKATESWARAN, Indianapolis, IN (US); Babu RAMAN, Indianapolis, IN (US); Paul SWANSON, Indianapolis, IN (US); Paul LEWER, Indianapolis, IN (US)

(21) Appl. No.: 14/865,734

(22) Filed: Sep. 25, 2015

Related U.S. Application Data
(60) Provisional application No. 62/056,213, filed on Sep. 26, 2014.

(51) Int. Cl. C12P 13/04; C12N 15/52; C12N 9/16; C12N 9/28; C07K 14/32; C12N 9/00

(52) U.S. Cl. CPC C12P 13/04; C07K 14/32; C12N 9/93; C12N 9/16; C12N 9/2417; C12N 15/52; C12Y 301/02; C12Y 603/02; C12Y 302/01001

(57) ABSTRACT

The present disclosure provides novel compositions and methods for the production and use of polynucleotide sequences encoding a chimeric non-ribosomal peptide synthetase (NRPS) fusion protein for the biosynthesis of N-acylglycine biosurfactants within a heterologous expression system.

### CROSS-REFERENCE TO RELATED APPLICATIONS

[0001] This application claims the benefit under 35 USC §119(e) of U.S. Provisional Application Ser. No. 62/056,213, filed on Sep. 26, 2014, the entire disclosure of which is incorporated herein by reference.

### INCORPORATION BY REFERENCE OF MATERIAL SUBMITTED ELECTRONICALLY

[0002] Incorporated by reference in its entirety is a computer-readable nucleotide/amino acid sequence listing submitted concurrently herewith and identified as follows: One 650,665 byte ASCII (Text) file named “14764-241762_SL.txt” created on Sep. 25, 2015.

### BACKGROUND OF THE INVENTION

[0003] N-acylglycine surfactants have traditionally been synthesized via chemical manufacturing processes that utilize chemical feedstocks. The production and manufacture of such surfactants rely upon the use of petrochemicals that are a non-renewable energy source. As such, the costs associated with obtaining petrochemical feedstocks fluctuate with the economic markets. N-acylglycine surfactants must be synthesized via complex chemical processes that require numerous steps of distinct and separate chemical reactions. Finally, the traditional manufacturing process of N-acylglycine surfactants produce chemical waste products that must be remediated for proper disposal.

[0004] Therefore, a need exists for development of improved synthesis and manufacturing processes of N-acylglycine surfactants acids via renewable production systems such as microbial fermentation.

[0005] The foregoing examples of the related art and limitations related therewith are intended to be illustrative and not exclusive. Other limitations of the related art will become apparent to those of skill in the art upon a reading of the specification.

### BRIEF SUMMARY OF THE INVENTION

[0006] The present disclosure is directed to a metabolically-engineered microorganism capable of synthesizing an N-acylglycine biosurfactant, the microorganism comprising a comprising a chimeric fusion protein. Generally, the chimeric fusion protein comprises a glycine adenylation domain operably linked to a condensation domain, a peptidyl carrier protein domain, a thioesterase domain, and the type II TE domain. In some embodiments glycine adenylation domain is isolated from a DhbF protein of SEQ ID NO:10 or a PksJ protein of SEQ ID NO:12. In other embodiments, the glycine adenylation domain protein motif comprises is a polypeptide of SEQ ID NO:40, SEQ ID NO:41, SEQ ID NO:42, SEQ ID NO:89, or SEQ ID NO:1. In further embodiments, the glycine adenylation domain comprises from the DhbF protein of SEQ ID NO:9 or the PksJ protein of SEQ ID NO:11. Further embodiments, include the condensation domain, the peptidyl carrier protein domain, the thioesterase domain, and the type II TE domain that are encoded by the surfactin gene cluster. The surfactin gene cluster can be selected from SrfAA-M3 (SEQ ID NO:4), SrfAA-M2 (SEQ ID NO:3), SrfAA-M1 (SEQ ID NO:2), SrfAB-M6 (SEQ ID NO:7), SrfAB-M5 (SEQ ID NO:6), SrfAB-M4 (SEQ ID NO:5), of SrfAC-M7 (SEQ ID NO:8).

[0007] In another aspect of the subject disclosure, the glycine adenylation domain is operably linked to the condensation domain at the amino acid sequence of SDAEKQM (SEQ ID NO: 53) or TLISDAEK (SEQ ID NO: 54), wherein E comprises the junction between the glycine adenylation domain and the condensation domain. In another embodiment, the glycine adenylation domain is operably linked to the peptidyl carrier protein domain at the amino acid sequence of WQEVLNVEKAGIF (SEQ ID NO: 57), wherein N comprises the junction between the glycine adenylation domain and the peptidyl carrier protein domain. In a further embodiment, the glycine adenylation domain is operably linked to the peptidyl carrier protein domain at the amino acid sequence of RVGIDDDFFALG (SEQ ID NO: 56) or IEWDDDFFAL (SEQ ID NO: 55), wherein the third D comprises the junction between the glycine adenylation domain and the peptidyl carrier protein domain.

[0008] In one aspect the microorganism of the subject disclosure is a gram (−) or a gram (+) bacteria. Exemplary gram (+) bacterium can be Bacillus subtilis. Exemplary gram (−) bacteria can be Escherichia coli. In other aspects of the disclosure, a polynucleotide encoding the chimeric fusion protein is expressed by a bacterial promoter. An exemplary bacterial promoter can be a PsrfA bacterial promoter. In another aspect of the disclosure, the polynucleotide encoding the chimeric fusion protein is codon optimized for expression in the microorganism. In a further aspect of the subject disclosure, the polynucleotide encoding the chimeric fusion protein is integrated within a genomic locus of the microorganism. An exemplary genomic locus can be the amyE genomic locus of a microorganism. In an embodiment, the integration within the genomic locus of a microorganism occurs via homologous recombination. In another aspect of the subject disclosure, the polynucleotide encoding the chimeric fusion protein is integrated within an autonomously replicating plasmid. In other embodiments, the chimeric fusion protein is encoded by a polynucleotide with at least 90% sequence identity to ME-B0004 (SEQ ID NO:15), ME-B0007 (SEQ ID NO:13), and ME-B0008 (SEQ ID NO:14). The subject disclosure herein relates to a metabolically-engineered microorganism that expresses a chimeric fusion protein that subsequently results in the synthesis of N-acylglycine from medium chain length β-hydroxy fatty acids.

[0009] The present disclosure is further directed to a method for producing N-acylglycine from a microorganism. The microorganism comprising a polynucleotide encoding a chimeric fusion protein is provided. The microorganism is cultured to produce a medium chain length β-hydroxy fatty acid. The chimeric fusion protein is expressed, wherein the expression of the chimeric fusion protein synthesizes N-acylglycine from the medium chain length β-hydroxy fatty acid. N-acylglycine is purified from the microorganism.

[0010] The present disclosure is directed to a method for fermenting N-acylglycine within a microorganism. The microorganism comprising a polynucleotide encoding a chimeric fusion protein in is fermented. The chimeric fusion protein is expressed, wherein the expression of the chimeric fusion protein synthesizes N-acylglycine from a medium chain length β-hydroxy fatty acid. N-acylglycine is fermented within the microorganism.

[0011] In another aspect, the present disclosure is directed to a chimeric polynucleotide sequence comprising a glycine adenylation domain. In an embodiment, the glycine adenylation domain is selected from: a polynucleotide motif comprising a glycine adenylation domain motif of SEQ ID NO:40, SEQ ID NO:41, SEQ ID NO:42, or SEQ ID NO:1; a polynucleotide comprising at least 90% sequence identity to the polynucleotide of SEQ ID NO:49, or SEQ ID NO:52; a polynucleotide encoding a polypeptide comprising at least 90% sequence identity to SEQ ID NO:10, SEQ ID NO:12, SEQ ID NO:58, SEQ ID NO:59, SEQ ID NO:60, SEQ ID NO:61, SEQ ID NO:62, SEQ ID NO:63, SEQ ID NO:64, SEQ ID NO:65, or SEQ ID NO:66; and, a polynucleotide of a coding sequence comprising a glycine adenylation domain of Table 1. In further embodiments, the glycine adenylation domain is operably linked to a condensation domain. An exemplary condensation domain comprises a polynucleotide with at least 90% sequence identity to SEQ ID NO:50. Further examples of a condensation domain include a polynucleotide encoding a polypeptide with at least 90% sequence identity to SEQ ID NO:67, SEQ ID NO:68, SEQ ID NO:69, SEQ ID NO:70, SEQ ID NO:71, SEQ ID NO:72, SEQ ID NO:73, SEQ ID NO:74, SEQ ID NO:75, or SEQ ID NO:76. In another embodiment, the glycine adenylation domain is operably linked to a peptidyl carrier protein domain. An exemplary peptidyl carrier protein domain comprises a polynucleotide with at least 90% sequence identity to SEQ ID NO:51. Further examples of a peptidyl carrier protein domain include a polynucleotide encoding a polypeptide with at least 90% sequence identity to SEQ ID NO:77, SEQ ID NO:78, SEQ ID NO:79, SEQ ID NO:80, SEQ ID NO:81, SEQ ID NO:82, SEQ ID NO:83, SEQ ID NO:84, SEQ ID NO:85, or SEQ ID NO:86. In an additional embodiment, the glycine adenylation domain is operably linked to a thioesterase domain. An exemplary thioesterase domain comprises a polynucleotide with at least 90% sequence identity to SEQ ID NO:51. Further examples of a thioesterase domain include a polypeptide with at least 90% sequence identity to SEQ ID NO:87, or SEQ ID NO:88. In an embodiment, the chimeric polynucleotide sequence comprises a NRPS fusion gene construct of a polypeptide with at least 90% sequence identity to SEQ ID NO:13, SEQ ID NO:14, or SEQ ID NO:15. The expression of the NRPS fusion gene construct results in the synthesis of N-acylglycine from a medium chain length β-hydroxy fatty acid. In further embodiments, the glycine adenylation domain of the chimeric polynucleotide sequence is transformed into a bacterial microorganism. The resulting bacterial microorganism results in synthesis of an N-acylglycine biosurfactant from a medium chain length β-hydroxy fatty acid.

[0012] In addition to the exemplary aspects and embodiments described above, further aspects and embodiments will become apparent by study of the following descriptions.

### BRIEF DESCRIPTION OF THE FIGURES

[0013] FIG. 1 illustrates an overview of the NRPS domain construction strategy for the fusion construct. The following domains are provided; C: condensation domain, A: adenylation domain, P: peptidyl carrier protein domain, and TE: thioesterase domain, SrfAD; typeII-thioesterase.

[0014] FIG. 2 illustrates the ClustalW2® alignment of protein sequences of C and A domain junctions, and the A and PCP domain junctions. The amino-acid residues highlighted and identified with an asterisk were identified as the fusion points between different domains. The amino-acid residues highlighted define the junction between different domains as identified by the NRPS predictor software. FIG. 2A discloses SEQ ID NOS 97-105, respectively, in order of appearance. FIG. 2B discloses SEQ ID NOS 106-115, respectively, in order of appearance.

[0015] FIG. 3A illustrates the module fusion strategy for construct ME-B007 (BSU3a) The highlighted amino-acid residues were the sequences used for the chimeric fusion and identify the fusion points between the domains of the NRPS fusion protein. FIG. 3A discloses SEQ ID NOS 101, 100, 97, 104, 99, 98, 105, 102, 103, 111, 108, 112, 110, 114, 113, 109, 106, and 115, respectively, in order of appearance.

[0016] FIG. 3B illustrates the module fusion strategy for construct ME-B008 (BSU4a) The highlighted amino-acid residues were the sequences used for the chimeric fusion and identify the fusion points between the domains of the NRPS fusion protein. FIG. 3B discloses SEQ ID NOS 101, 100, 97, 104, 99, 98, 105, 102, 103, 111, 108, 112, 110, 114, 113, 109, 106, and 115, respectively, in order of appearance.

[0017] FIG. 3C illustrates the module fusion strategy for construct ME-B004 (Dhbf3a) The highlighted amino-acid residues were the sequences used for the chimeric fusion and identify the fusion points between the domains of the NRPS fusion protein. FIG. 3C discloses SEQ ID NOS 101, 100, 97, 104, 99, 98, 105, 102, 103, 111, 108, 112, 110, 114, 113, 109, 106, and 115, respectively, in order of appearance.

[0018] FIG. 4 illustrates the plasmid map of the fusion gene expression construct of ME-B007.

[0019] FIG. 5 illustrates the plasmid map of the fusion gene expression construct of ME-B008.

[0020] FIG. 6 illustrates the plasmid map of the fusion gene expression construct of ME-B004.

[0021] FIG. 7 illustrates an overview of the plasmid design of the NRPS fusion gene constructs and their genomic integration and expression in B. subtilis str. OKB120.

[0022] FIG. 8 illustrates a summary of structures referred to in Example 9, including two isomeric target N-acylglycine surfactant products (1) and (2) produced by the expression of the NRPS chimeric fusion proteins and an analytical standard (3).

[0023] FIG. 9A exemplifies LC-SIM-MS chromatograms for B. subtilis str. OKB120 engineered strains (OKB120-dhfb3) of ME-B0004 expressing NRPS fusion protein containing glycine specific adenylation domain from the non-native B. subtilis protein dhbF, which were used to quantify the products 1 and 2.

[0024] FIG. 9B exemplifies LC-SIM-MS chromatograms for B. subtilis str. OKB120 engineered strains (OKB120-BSU3a) expressing NRPS fusion protein containing glycine specific adenylation domain from the non-native B. subtilis protein BSU17180 (PksJ), which were used to quantify the products 1 and 2.

[0025] FIG. 9C exemplifies LC-SIM-MS chromatograms for B. subtilis str. OKB120 engineered strains (OKB120-BSU4a) expressing NRPS fusion protein containing glycine specific adenylation domain from the non-native B. subtilis protein BSU17180 (PksJ), which were used to quantify the products 1 and 2.

[0026] FIG. 10 provides a CLUSTAL 2.1® multiple sequence alignment of the five glycine-specific adenylation domains from Bacillus subtilis, Bacillus amyloliquefaciens, and Streptomyces roseosporus. The amino acids lining the substrate binding pocket of the adenylation domain which confer specificity (corresponding to amino acid residues at positions 235, 236, 239, 278, 299, 301, 322, 330, and 331 of the substrate-binding pocket of the gramicidin S synthase (GrsA) phenylalanine activating domain; Challis G L, Ravel J, Townsend C A. Predictive, structure-based model of amino acid recognition by nonribosomal peptide synthetase adenylation domains. Chem Biol. 2000 March; 7(3):211-24, and Stachelhaus T, Mootz H D, Marahiel M A. The specificity-conferring code of adenylation domains in nonribosomal peptide synthetases. Chem Biol. 1999 August; 6(8):493-505) are boxed.

### DETAILED DESCRIPTION

### I. Overview

[0027] Disclosed herein are novel, chimeric nonribosomal peptide synthetase (NRPS) fusion protein sequences that result from the engineering of a glycine-specific adenylation domain within the NRPS fusion protein. The NRPS is a modular multi-domain enzyme that can selectively bind and condense amino acids to enzymatically produce products of varied structural and functional diversity. The number of modules and their organization comprising the NRPS determines the primary structure of the corresponding peptide products. A component of each module of the NRPS machinery is an ‘adenylation domain (herein referred to as an “A domain” or “A-domain”)’ that recognizes a specific amino acid building block and recruits the amino acid to a peptidyl or amino-acyl chain. By exchanging the native A-domain for a glycine specific A-domain, the resulting chimeric NRPS fusion protein can be designed to specifically recognize the amino acid glycine. The chimeric NRPS fusion protein successfully enables the in vivo acylation of the amino acid glycine into a medium chain-length β-hydroxy fatty acid peptide chain. As such, the chimeric NRPS fusion protein is expressed in a prokaryotic species, and subsequently fermented to result in the production of the non-native lipoamino acid, N-acylglycine biosurfactant.

### II. Terms

[0028] Unless defined otherwise, all technical and scientific terms used herein have the same meaning as commonly understood by one of ordinary skill in the art to which this disclosure relates. In case of conflict, the present application including the definitions will control. Unless otherwise required by context, singular terms shall include pluralities and plural terms shall include the singular. All publications, patents and other references mentioned herein are incorporated by reference in their entireties for all purposes as if each individual publication or patent application were specifically and individually indicated to be incorporated by reference, unless only specific sections of patents or patent publications are indicated to be incorporated by reference.

[0029] In order to further clarify this disclosure, the following terms, abbreviations and definitions are provided.

[0030] As used herein, the terms “comprises”, “comprising”, “includes”, “including”, “has”, “having”, “contains”, or “containing”, or, any other variation thereof, are intended to be non-exclusive or open-ended. For example, a composition, a mixture, a process, a method, an article, or an apparatus that comprises a list of elements is not necessarily limited to only those elements but may include other elements not expressly listed or inherent to such composition, mixture, process, method, article, or apparatus. Further, unless expressly stated to the contrary, “or” refers to an inclusive or and not to an exclusive or. For example, a condition A or B is satisfied by any one of the following: A is true (or present) and B is false (or not present), A is false (or not present) and B is true (or present), and both A and B are true (or present).

[0031] The term “invention” or “present invention” as used herein is a non-limiting term and is not intended to refer to any single embodiment of the particular invention but encompasses all possible embodiments as disclosed in the application.

[0032] As used herein, “endogenous sequence” defines the native form of a polynucleotide, gene or polypeptide in its natural location in the organism or in the genome of an organism.

[0033] The term “isolated”, as used herein means having been removed from its natural environment.

[0034] The term “purified”, as used herein relates to the isolation of a molecule or compound in a form that is substantially free of contaminants normally associated with the molecule or compound in a native or natural environment and means having been increased in purity as a result of being separated from other components of the original composition. The term “purified nucleic acid” is used herein to describe a nucleic acid sequence which has been separated from other compounds including, but not limited to polypeptides, lipids and carbohydrates.

[0035] As used herein, the terms “polynucleotide”, “nucleic acid”, and “nucleic acid molecule” are used interchangeably, and may encompass a singular nucleic acid; plural nucleic acids; a nucleic acid fragment, variant, or derivative thereof; and nucleic acid construct (e.g., messenger RNA (mRNA) and plasmid DNA (pDNA)). A polynucleotide or nucleic acid may contain the nucleotide sequence of a full-length cDNA sequence, or a fragment thereof, including untranslated 5′ and/or 3′ sequences and coding sequence(s). A polynucleotide or nucleic acid may be comprised of any polyribonucleotide or polydeoxyribonucleotide, which may include unmodified ribonucleotides or deoxyribonucleotides or modified ribonucleotides or deoxyribonucleotides. For example, a polynucleotide or nucleic acid may be comprised of single- and double-stranded DNA; DNA that is a mixture of single- and double-stranded regions; single- and double-stranded RNA; and RNA that is mixture of single- and double-stranded regions. Hybrid molecules comprising DNA and RNA may be single-stranded, double-stranded, or a mixture of single- and double-stranded regions. The foregoing terms also include chemically, enzymatically, and metabolically modified forms of a polynucleotide or nucleic acid.

[0036] It is understood that a specific DNA or polynucleotide refers also to the complement thereof, the sequence of which is determined according to the rules of deoxyribonucleotide base-pairing. Although only one strand of DNA may be presented in the sequence listings of this disclosure, those having ordinary skill in the art will recognize that the complementary strand can be ascertained and determined from the strand presented herein. Accordingly, a single strand of a polynucleotide can be used to determine the complementary strand, and, accordingly, both strands (i.e., the sense strand and anti-sense strand) are exemplified from a single strand.

[0037] As used herein, the term “gene” refers to a nucleic acid that encodes a functional product (RNA or polypeptide/protein). A gene may include regulatory sequences preceding (5′ non-coding sequences) and/or following (3′ non-coding sequences) the sequence encoding the functional product.

[0038] As used herein, the term “coding sequence” refers to a nucleic acid sequence that encodes a specific amino acid sequence. A “regulatory sequence” refers to a nucleotide sequence located upstream (e.g., 5′ non-coding sequences), within, or downstream (e.g., 3′ non-coding sequences) of a coding sequence, which influence the transcription, RNA processing or stability, or translation of the associated coding sequence. Regulatory sequences include, for example and without limitation: promoters; translation leader sequences; introns; polyadenylation recognition sequences; RNA processing sites; effector binding sites; and stem-loop structures.

[0039] As used herein, the term “polypeptide” includes a singular polypeptide, plural polypeptides, and fragments thereof. This term refers to a molecule comprised of monomers (amino acids) linearly linked by amide bonds (also known as peptide bonds). The term “polypeptide” refers to any chain or chains of two or more amino acids, and does not refer to a specific length or size of the product. Accordingly, peptides, dipeptides, tripeptides, oligopeptides, protein, amino acid chain, and any other term used to refer to a chain or chains of two or more amino acids, are included within the definition of “polypeptide”, and the foregoing terms are used interchangeably with “polypeptide” herein. A polypeptide may be isolated from a natural biological source or produced by recombinant technology, but a specific polypeptide is not necessarily translated from a specific nucleic acid. A polypeptide may be generated in any appropriate manner, including for example and without limitation, by chemical synthesis. Likewise, a polypeptide may be generated by expressing a native coding sequence, or portion thereof, that is introduced into an organism in a form that is different from the corresponding native coding sequence.

[0040] In contrast, the term “heterologous” refers to a polynucleotide, gene or polypeptide that is not normally found at its location in the reference (host) organism. For example, a heterologous nucleic acid may be a nucleic acid that is normally found in the reference organism at a different genomic location. By way of further example, a heterologous nucleic acid may be a nucleic acid that is not normally found in the reference organism. A host organism comprising a hetereologous polynucleotide, gene or polypeptide may be produced by introducing the heterologous polynucleotide, gene or polypeptide into the host organism. In particular examples, a heterologous polynucleotide comprises a native coding sequence, or portion thereof, that is reintroduced into a source organism in a form that is different from the corresponding native polynucleotide. In particular examples, a heterologous gene comprises a native coding sequence, or portion thereof, that is reintroduced into a source organism in a form that is different from the corresponding native gene. For example, a heterologous gene may include a native coding sequence that is a portion of a chimeric gene including non-native regulatory regions that is reintroduced into the native host. In particular examples, a heterologous polypeptide is a native polypeptide that is reintroduced into a source organism in a form that is different from the corresponding native polypeptide.

[0041] A heterologous, gene or polypeptide may be a gene or polypeptide that comprises a functional polypeptide or nucleic acid sequence encoding a functional polypeptide that is fused to another gene or polypeptide to produce a chimeric or fusion polypeptide, or a gene encoding the same. Genes and proteins of particular embodiments include specifically exemplified full-length sequences and portions, segments, fragments (including contiguous fragments and internal and/or terminal deletions compared to the full-length molecules), variants, mutants, chimerics, and fusions of these sequences.

[0042] As used herein, the term “modification” can refer to a change in a polynucleotide disclosed herein that results in reduced, substantially eliminated or eliminated activity of a polypeptide encoded by the polynucleotide, as well as a change in a polypeptide disclosed herein that results in reduced, substantially eliminated or eliminated activity of the polypeptide. Alternatively, the term “modification” can refer to a change in a polynucleotide disclosed herein that results in increased or enhanced activity of a polypeptide encoded by the polynucleotide, as well as a change in a polypeptide disclosed herein that results in increased or enhanced activity of the polypeptide. Such changes can be made by methods well known in the art, including, but not limited to, deleting, mutating (e.g., spontaneous mutagenesis, random mutagenesis, mutagenesis caused by mutator genes, or transposon mutagenesis), substituting, inserting, down-regulating, altering the cellular location, altering the state of the polynucleotide or polypeptide (e.g., methylation, phosphorylation or ubiquitination), removing a cofactor, introduction of an antisense RNA/DNA, introduction of an interfering RNA/DNA, chemical modification, covalent modification, irradiation with UV or X-rays, homologous recombination, mitotic recombination, promoter replacement methods, and/or combinations thereof. Guidance in determining which nucleotides or amino acid residues can be modified, can be found by comparing the sequence of the particular polynucleotide or polypeptide with that of homologous polynucleotides or polypeptides, e.g., yeast or bacterial, and maximizing the number of modifications made in regions of high homology (conserved regions) or consensus sequences.

[0043] The term “derivative”, as used herein, refers to a modification of a sequence set forth in the present disclosure. Illustrative of such modifications would be the substitution, insertion, and/or deletion of one or more bases relating to a nucleic acid sequence of a coding sequence disclosed herein that preserve, slightly alter, or increase the function of a coding sequence disclosed herein in crop species. Such derivatives can be readily determined by one skilled in the art, for example, using computer modeling techniques for predicting and optimizing sequence structure. The term “derivative” thus also includes nucleic acid sequences having substantial sequence identity with the disclosed coding sequences herein such that they are able to have the disclosed functionalities for use in producing embodiments of the present disclosure.

[0044] The term “promoter” refers to a DNA sequence capable of controlling the expression of a nucleic acid coding sequence or functional RNA. In examples, the controlled coding sequence is located 3′ to a promoter sequence. A promoter may be derived in its entirety from a native gene, a promoter may be comprised of different elements derived from different promoters found in nature, or a promoter may even comprise rationally designed DNA segments. It is understood by those skilled in the art that different promoters can direct the expression of a gene in different cell types, or at different stages of development, or in response to different environmental or physiological conditions. Examples of all of the foregoing promoters are known and used in the art to control the expression of heterologous nucleic acids. Promoters that direct the expression of a gene in most cell types at most times are commonly referred to as “constitutive promoters.” Furthermore, while those in the art have (in many cases unsuccessfully) attempted to delineate the exact boundaries of regulatory sequences, it has come to be understood that DNA fragments of different lengths may have identical promoter activity. The promoter activity of a particular nucleic acid may be assayed using techniques familiar to those in the art.

[0045] The term “operably linked” refers to an association of nucleic acid sequences on a single nucleic acid, wherein the function of one of the nucleic acid sequences is affected by another. For example, a promoter is operably linked with a coding sequence when the promoter is capable of effecting the expression of that coding sequence (e.g., the coding sequence is under the transcriptional control of the promoter). A coding sequence may be operably linked to a regulatory sequence in a sense or antisense orientation.

[0046] The term “expression”, as used herein, may refer to the transcription and stable accumulation of sense (mRNA) or antisense RNA derived from a DNA. Expression may also refer to translation of mRNA into a polypeptide. As used herein, the term “overexpression” refers to expression that is higher than endogenous expression of the same gene or a related gene. Thus, a heterologous gene is “overexpressed” if its expression is higher than that of a comparable endogenous gene.

[0047] As used herein, the term “transformation” or “transforming” refers to the transfer and integration of a nucleic acid or fragment thereof into a host organism, resulting in genetically stable inheritance. Host organisms containing a transforming nucleic acid are referred to as “transgenic,” “recombinant,” or “transformed” organisms.

[0048] The terms “plasmid” and “vector”, as used herein, refer to an extra chromosomal element that may carry one or more gene(s) that are not part of the central metabolism of the cell. Plasmids and vectors typically are circular double-stranded DNA molecules. However, plasmids and vectors may be linear or circular nucleic acids, of a single- or double-stranded DNA or RNA, and may carry DNA derived from essentially any source, in which a number of nucleotide sequences have been joined or recombined into a unique construction that is capable of introducing a promoter fragment and a coding DNA sequence along with any appropriate 3′ untranslated sequence into a cell. In examples, plasmids and vectors may comprise autonomously replicating sequences for propagation in bacterial hosts.

[0049] “Polypeptide” and “protein” are used interchangeably herein and include a molecular chain of two or more amino acids linked through peptide bonds. The terms do not refer to a specific length of the product. Thus, “peptides”, and “oligopeptides”, are included within the definition of polypeptide. The terms include post-translational modifications of the polypeptide, for example, glycosylations, acetylations, phosphorylations and the like. In addition, protein fragments, analogs, mutated or variant proteins, fusion proteins and the like are included within the meaning of polypeptide. The terms also include molecules in which one or more amino acid analogs or non-canonical or unnatural amino acids are included as can be synthesized, or expressed recombinantly using known protein engineering techniques. In addition, inventive fusion proteins can be derivatized as described herein by well-known organic chemistry techniques.

[0050] The term “fusion protein” indicates that the protein includes polypeptide components derived from more than one parental protein or polypeptide. Typically, a fusion protein is expressed from a fusion gene in which a nucleotide sequence encoding a polypeptide sequence from one protein is appended in frame with, and optionally separated by a linker from, a nucleotide sequence encoding a polypeptide sequence from a different protein. The fusion gene can then be expressed by a recombinant host cell as a single protein.

[0051] Expression “control sequences” refers collectively to promoter sequences, ribosome binding sites, transcription termination sequences, upstream regulatory domains, enhancers, and the like, which collectively provide for the transcription and translation of a coding sequence in a host cell. Not all of these control sequences need always be present in a recombinant vector so long as the desired gene is capable of being transcribed and translated.

[0052] “Recombination” refers to the reassortment of sections of DNA or RNA sequences between two DNA or RNA molecules. “Homologous recombination” occurs between two DNA molecules which hybridize by virtue of homologous or complementary nucleotide sequences present in each DNA molecule.

[0053] The terms “stringent conditions” or “hybridization under stringent conditions” refers to conditions under which a probe will hybridize preferentially to its target subsequence, and to a lesser extent to, or not at all to, other sequences. “Stringent hybridization” and “stringent hybridization wash conditions” in the context of nucleic acid hybridization experiments such as Southern and Northern hybridizations are sequence dependent, and produce different results under varying experimental parameters. An extensive guide to the hybridization of nucleic acids is found in Tijssen (1993) Laboratory Techniques in Biochemistry and Molecular Biology—Hybridization with Nucleic Acid Probes, Part I, Chapter 2: Overview of principles of hybridization and the strategy of nucleic acid probe assays, Elsevier, New York. Generally, “highly stringent conditions” result in the hybridization of a probe to a polynucleotide sequence, wherein the probe and polynucleotide sequence share at least 85% sequence identity. The “highly stringent conditions” include stringent hybridization and wash conditions that are selected to be about 5° C. lower than the thermal melting point (Tm) for the specific sequence at a defined ionic strength and pH. The Tm is the temperature (under defined ionic strength and pH) at which 50% of the target sequence hybridizes to a perfectly matched probe. “Very highly stringent conditions” result in the hybridization of a probe to a polynucleotide sequence, wherein the probe and polynucleotide sequence share at least 95% sequence identity. The “very highly stringent conditions” include stringent hybridization and wash conditions that are selected to be equal to the Tm for a particular probe.

[0054] An example of stringent hybridization conditions for hybridization of complementary nucleic acids which have more than 100 complementary residues on a filter in a Southern or Northern blot is 50% formamide with 1 mg of heparin at 42° C., with the hybridization being carried out overnight. An example of highly stringent wash conditions is 0.15 M NaCl at 72° C. for about 15 minutes. An example of stringent wash conditions is a 0.2×SSC wash at 65° C. for 15 minutes (see, Sambrook et al. (1989) Molecular Cloning—A Laboratory Manual (2nd ed.) Vol. 1-3, Cold Spring Harbor Laboratory, Cold Spring Harbor Press, NY, for a description of SSC buffer). Often, a high stringency wash is preceded by a low stringency wash to remove background probe signal. An example medium stringency wash for a duplex of, e.g., more than 100 nucleotides, is 1×SSC at 45° C. for 15 minutes. An example low stringency wash for a duplex of, e.g., more than 100 nucleotides, is 4-6×SSC at 40° C. for 15 minutes. In general, a signal to noise ratio of 2× (or higher) than that observed for an unrelated probe in the particular hybridization assay indicates detection of a specific hybridization. Nucleic acids which do not hybridize to each other under stringent conditions are still substantially identical if the polypeptides which they encode are substantially identical. This occurs, e.g., when a copy of a nucleic acid is created using the maximum codon degeneracy permitted by the genetic code.

[0055] The disclosure also relates to a polynucleotide probe hybridizable under stringent conditions, and in some instances under highly stringent conditions, and in further instances under very highly stringent conditions to a polynucleotide as of the present disclosure.

[0056] As used herein, the term “hybridizing” is intended to describe conditions for hybridization and washing under “stringent conditions” for which nucleotide sequences at least about 50%, at least about 60%, at least about 70%, more preferably at least about 80% identical to each other typically remain hybridized to each other. As used herein, the term “hybridizing” is intended to describe conditions for hybridization and washing under “highly stringent conditions” for which nucleotide sequences at least about 85%, at least about 90%, identical to each other typically remain hybridized to each other. As used herein, the term “hybridizing” is intended to describe conditions for hybridization and washing under “very highly stringent conditions” for which nucleotide sequences at least about 95%, at least about 99%, identical to each other typically remain hybridized to each other.

[0057] In some embodiments an isolated nucleic acid molecule of the disclosure that hybridizes under highly stringent conditions to a nucleotide sequence of the disclosure can correspond to a naturally-occurring nucleic acid molecule. As used herein, a “naturally-occurring” nucleic acid molecule refers to an RNA or DNA molecule having a nucleotide sequence that occurs in nature (e.g., encodes a natural protein).

[0058] A skilled artisan will know which conditions to apply for stringent and highly stringent hybridization conditions. Additional guidance regarding such conditions is readily available in the art, for example, in Sambrook et al., 1989, Molecular Cloning, A Laboratory Manual, Cold Spring Harbor Press, N.Y.; and Ausubel et al. (eds.), 1995, Current Protocols in Molecular Biology, (John Wiley & Sons, N.Y.).

[0059] The terms “homology” or “percent identity” are used interchangeably herein. For the purpose of this disclosure, it is defined here that in order to determine the percent identity of two amino acid sequences or of two nucleic acid sequences, the sequences are aligned for optimal comparison purposes (e.g., gaps may be introduced in the sequence of a first amino acid or nucleic acid sequence for optimal alignment with a second amino or nucleic acid sequence). The amino acid residues or nucleotides at corresponding amino acid positions or nucleotide positions are then compared. When a position in the first sequence is occupied by the same amino acid residue or nucleotide as the corresponding position in the second sequence, then the molecules are identical at that position. The percent identity between the two sequences is a function of the number of identical positions shared by the sequences (i.e., % identity=number of identical positions/total number of positions (i.e., overlapping positions×100). Preferably, the two sequences are the same length.

[0060] The skilled person will be aware of the fact that several different computer programs are available to determine the homology between two sequences. For instance, a comparison of sequences and determination of percent identity between two sequences may be accomplished using a mathematical algorithm. In a preferred embodiment, the percent identity between two amino acid sequences is determined using the Needleman and Wunsch (J. Mol. Biol. (48): 444-453 (1970)) algorithm which has been incorporated into the GAP program in the GCG software package (available on the internet at the accelrys website, more specifically at http://www.accelrys.com), using either a Blossom 62 matrix or a PAM250 matrix, and a gap weight of 16, 14, 12, 10, 8, 6 or 4 and a length weight of 1, 2, 3, 4, 5 or 6. The skilled person will appreciate that all these different parameters will yield slightly different results but that the overall percentage identity of two sequences is not significantly altered when using different algorithms.

[0061] In yet another embodiment, the percent identity between two nucleotide sequences is determined using the GAP program in the GCG software package (available on the internet at the accelrys website, more specifically at http://www.accelrys.com), using a NWSgapdna.CMP matrix and a gap weight of 40, 50, 60, 70 or 80 and a length weight of 1, 2, 3, 4, 5 or 6. In another embodiment, the percent identity between two amino acid or nucleotide sequences is determined using the algorithm of E. Meyers and W. Miller (CABIOS, 4: 11-17 (1989) which has been incorporated into the ALIGN program (version 2.0) (available on the internet at the vega website, more specifically ALIGN-IGH Montpellier, or more specifically at http://vega.igh.cnrs.fr/bin/align-guess.cgi) using a PAM120 weight residue table, a gap length penalty of 12 and a gap penalty of 4.

[0062] The nucleic acid and protein sequences of the present disclosure may further be used as a “query sequence” to perform a search against public databases to, for example, identify other family members or related sequences. Such searches may be performed using the BLASTN and BLASTX programs (version 2.0) of Altschul, et al. (1990) J. Mol. Biol. 215:403-10. BLAST nucleotide searches may be performed with the BLASTN program, score=100, word length=12 to obtain nucleotide sequences identical to the nucleic acid molecules of the present disclosure. BLAST protein searches may be performed with the BLASTX program, score=50, word length=3 to obtain amino acid sequences identical to the protein molecules of the present disclosure. To obtain gapped alignments for comparison purposes, Gapped BLAST may be utilized as described in Altschul et al., (1997) Nucleic Acids Res. 25 (17): 3389-3402. When utilizing BLAST and Gapped BLAST programs, the default parameters of the respective programs (e.g., BLASTX and BLASTN) may be used. (Available on the internet at the ncbi website, more specifically at www.ncbi.nlm.nih.gov).

[0063] The term “motif” refers to short regions of conserved sequences of nucleic acids or amino acids that comprise part of a longer sequence.

[0064] The term “variant” refers to substantially similar sequences. Generally, nucleic acid sequence variants of the invention will have at least 46%, 48%, 50%, 52%, 53%, 55%, 60%, 65%, 70%, 75%, 76%, 77%, 78%, 79%, 80%, 85%, 86%, 87%, 88%, 89%, 90%, 91%, 92%, 93%, 94%, 95%, 96%, 97%, 98% or 99% sequence identity to the native nucleotide sequence, wherein the % sequence identity is based on the entire sequence and is determined by GAP 10 analysis using default parameters. Generally, polypeptide sequence variants of the invention will have at least about 60%, 65%, 70%, 75%, 76%, 77%, 78%, 79%, 80%, 81%, 82%, 83%, 84%, 85%, 86%, 87%, 88%, 89%, 90%, 91%, 92%, 93%, 94%, 95%, 96%, 97%, 98%, or 99% sequence identity to the native protein, wherein the % sequence identity is based on the entire sequence and is determined by GAP 10 analysis using default parameters. GAP uses the algorithm of Needleman and Wunsch (J. MoI. Biol. 48:443-453, 1970) to find the alignment of two complete sequences that maximizes the number of matches and minimizes the number of gaps.

[0065] The term “variant” also refers to substantially similar sequences that contain amino acid sequences highly similar to the motifs contained within the invention and optionally required for the biological function of the invention. Generally, polypeptide sequence variants of the invention will have at least 85%, 90% or 95% sequence identity to the conserved amino acid residues in the defined motifs.

[0066] Variants included in the invention may contain individual substitutions, deletions or additions to the nucleic acid or polypeptide sequences which alter, add or delete a single amino acid or a small percentage of amino acids in the encoded sequence. A “conservatively modified variant” is an alteration which results in the substitution of an amino acid with a chemically similar amino acid. When the nucleic acid is prepared or altered synthetically, advantage can be taken of known codon preferences of the intended host. The nucleic acid fragments of the instant invention may be used to isolate cDNAs and genes encoding proteins with homology or sequence identity from the same or other species. Isolation of homologous genes or genes with levels of shared sequence identity using sequence-dependent protocols is well known in the art. Examples of sequence-dependent protocols include, but are not limited to, methods of nucleic acid hybridization, and methods of DNA and RNA amplification as exemplified by various uses of nucleic acid amplification technologies (e.g., polymerase chain reaction, ligase chain reaction).

[0067] For example, genes encoding other NRPS fusion proteins, either as cDNAs or genomic DNAs, could be isolated directly by using all or a portion of the instant nucleic acid fragments as DNA hybridization probes to screen libraries from any desired organism employing methodology well known to those skilled in the art. Specific oligonucleotide probes based upon the instant nucleic acid sequences can be designed and synthesized by methods known in the art (Sambrook). Moreover, the entire sequences can be used directly to synthesize DNA probes by methods known to the skilled artisan such as random primer DNA labeling, nick translation, or end-labeling techniques, or RNA probes using available in vitro transcription systems. In addition, specific primers can be designed and used to amplify a part or all of the instant sequences. The resulting amplification products can be labeled directly during amplification reactions or labeled after amplification reactions, and used as probes to isolate full length cDNA or genomic fragments under conditions of appropriate stringency.

[0068] Strategies for designing and constructing variant genes and proteins that comprise contiguous residues of a particular molecule can be determined by obtaining and examining the structure of a protein of interest (e.g., atomic 3-D (three dimensional) coordinates from a crystal structure and/or a molecular model). In some examples, a strategy may be directed to certain segments of a protein that are ideal for modification, such as surface-exposed segments, and not internal segments that are involved with protein folding and essential 3-D structural integrity. U.S. Pat. No. 5,605,793, for example, relates to methods for generating additional molecular diversity by using DNA reassembly after random or focused fragmentation. This can be referred to as gene “shuffling”, which typically involves mixing fragments (of a desired size) of two or more different DNA molecules, followed by repeated rounds of renaturation. This process may improve the activity of a protein encoded by a subject gene. The result may be a chimeric protein having improved activity, altered substrate specificity, increased enzyme stability, altered stereospecificity, or other characteristics.

[0069] An amino acid “substitution” can be the result of replacing one amino acid in a reference sequence with another amino acid having similar structural and/or chemical properties (i.e., conservative amino acid substitution), or it can be the result of replacing one amino acid in a reference sequence with an amino acid having different structural and/or chemical properties (i.e., non-conservative amino acid substitution). Amino acids can be placed in the following structural and/or chemical classes: non-polar; uncharged polar; basic; and acidic. Accordingly, “conservative” amino acid substitutions can be made on the basis of similarity in polarity, charge, solubility, hydrophobicity, hydrophilicity, or the amphipathic nature of the residues involved. For example, non-polar (hydrophobic) amino acids include glycine, alanine, leucine, isoleucine, valine, proline, phenylalanine, tryptophan, and methionine; uncharged (neutral) polar amino acids include serine, threonine, cysteine, tyrosine, asparagine, and glutamine; positively charged (basic) amino acids include arginine, lysine, and histidine; and negatively charged (acidic) amino acids include aspartic acid and glutamic acid. Alternatively, “non-conservative” amino acid substitutions can be made by selecting the differences in the polarity, charge, solubility, hydrophobicity, hydrophilicity, or amphipathic nature of any of these amino acids. “Insertions” or “deletions” can be within the range of variation as structurally or functionally tolerated by the recombinant proteins.

[0070] In some embodiments, a variant protein is “truncated” with respect to a reference, full-length protein. In some examples, a truncated protein retains the functional activity of the reference protein. By “truncated” protein, it is meant that a portion of a protein may be cleaved off, for example, while the remaining truncated protein retains and exhibits the desired activity after cleavage. Cleavage may be achieved by any of various proteases. Furthermore, effectively cleaved proteins can be produced using molecular biology techniques, wherein the DNA bases encoding a portion of the protein are removed from the coding sequence, either through digestion with restriction endonucleases or other techniques available to the skilled artisan. A truncated protein may be expressed in a heterologous system, for example, B. subtilis, E. coli, baculoviruses, plant-based viral systems, and yeast. Truncated proteins conferring nonribosomal peptide synthetase activity may be confirmed by using the heterologous expression system expressing the proteins, such as described herein. It is well-known in the art that truncated proteins can be successfully produced so that they retain the functional activity of the full-length reference protein. For example, Bt proteins can be used in a truncated (core protein) form. See, e.g., Hofte and Whiteley (1989) Microbiol. Rev. 53(2):242-55; and Adang et al. (1985) Gene 36:289-300.

[0071] In some cases, especially for expression in bacterial strains, it can be advantageous to use truncated genes that express truncated proteins. Truncated genes may encode a polypeptide comprised of, for example, 40%, 41%, 42%, 43%, 44%, 45%, 46%, 47%, 48%, 49%, 50%, 51%, 52%, 53%, 54%, 55%, 56%, 57%, 58%, 59%, 60%, 61%, 62%, 63%, 64%, 65%, 66%, 67%, 68%, 69%, 70%, 71%, 72%, 73%, 74%, 75%, 76%, 77%, 78%, 79%, 80%, 81%, 82%, 83%, 84%, 85%, 86%, 87%, 88%, 89%, 90%, 91%, 92%, 93%, 94%, 95%, 96%, 97%, 98%, or 99% of the full-length protein. The variant genes and proteins that retain the function of the reference sequence from which they were designed may be determined by one of skill in the art, for example, by assaying recombinant variants for activity. If such an activity assay is known and characterized, then the determination of functional variants requires only routine experimentation.

[0072] Specific changes to the “active site” of an enzyme may be made to affect the inherent functionality with respect to activity or stereospecificity. See, Muller et. al. (2006) Protein Sci. 15(6): 1356-68. For example, the known tauD structure has been used as a model dioxygenase to determine active site residues while bound to its inherent substrate, taurine. See, Elkins et al. (2002) Biochemistry 41(16):5185-92. Further information regarding sequence optimization and designability of enzyme active sites can be found in Chakrabarti et al. (2005) Proc. Natl. Acad. Sci. USA 102(34):12035-40.

[0073] Various structural properties and three-dimensional features of a protein may be changed without adversely affecting the activity/functionality of the protein. Conservative amino acid substitutions can be made that do not adversely affect the activity and/or three-dimensional configuration of the molecule (“tolerated” substitutions). Variant proteins can also be designed that differ at the sequence level from the reference protein, but which retain the same or similar overall essential three-dimensional structure, surface charge distribution, and the like. See, e.g., U.S. Pat. No. 7,058,515; Larson et al. (2002) Protein Sci. 1 1:2804-13; Crameri et al. (1997) Nat. Biotechnol. 15:436-8; Stemmer (1994) Proc. Natl. Acad. Sci. USA 91:10747-51; Stemmer (1994) Nature 370:389-91; Stemmer (1995) Bio/Technology 13:549-53; Crameri et al. (1996) Nat. Med. 2:100-3; and Crameri et al. (1996) Nat. Biotechnol. 14: 315-9.

[0074] The term “chimeric” as used herein, means comprised of sequences that are “recombined”. For example the sequences are recombined and are not found together in nature.

[0075] The term “recombine” or “recombination” as used herein means refers to any method of joining polynucleotides. The term includes end to end joining, and insertion of one sequence into another. The term is intended to encompass includes physical joining techniques such as sticky-end ligation and blunt-end ligation. Such sequences may also be artificially, or recombinantly synthesized to contain the recombined sequences. Additionally, the term can encompass the integration of one sequence within a second sequence, for example the integration of a polynucleotide within the genome of an organism by homologous recombination can result from “recombination”.

### III. Embodiments of the Present Disclosure

[0076] In an embodiment, the subject disclosure relates to prokaryotic microorganisms that are metabolically engineered to produce non-native lipoamino acid, N-acylglycine biosurfactants. Prokaryotic microorganisms can be utilized for production of novel compounds via fermentation in cultures. As such, the microorganism is metabolically-engineered via recombinant DNA technology for the production of the desired chemical compound. The subject disclosure describes a process to utilize recombinant DNA technology to design and build a novel, chimeric fusion protein for the production an N-acylglycine biosurfactant within a prokaryotic microorganism.

[0077] In certain embodiments the biosurfactant is a metabolic product produced by a microorganism. The biosurfactant molecules are composed of two distinct moieties: a hydrophilic and a hydrophobic moiety. Biosurfactants can be categorized as glycolipids (a carbohydrate linked to a fatty acid), proteolipids (an amino acid or chain of amino acids linked to a fatty acid), or polymeric surfactants (high molecular weight structures consisting of fatty acids). The metabolic product may be a fatty acid, and in some instances the surfactant is a beta-hydroxy fatty acid. Typically, the biosurfactant is biodegradable, less toxic, and produced more efficiently than synthetic compounds produced from chemical refinement of a feedstock (i.e., petrochemical feed stocks).

[0078] Various strains of microorganisms are capable of producing surfactants. For example; Bacillus sp. (i.e., Bacillus subtilis), Mycobacterium sp., Corynebacterium sp., Ustilago sp., Arthrobacter sp., Candida sp.; Pseudomonas sp., Torulopsis sp., Escherchia sp. and Rhodococcus sp. are only a few of the many various types of microorganisms that can naturally produce surfactants. In an embodiment, the metabolically engineered microorganism of the subject disclosure can comprise a Bacillus sp., Mycobacterium sp., Corynebacterium sp., Ustilago sp., Arthrobacter sp., Candida sp., Pseudomonas sp., Torulopsis sp., Escherchia sp., and Rhodococcus sp. In further embodiments, the metabolically engineered microorganism of the subject disclosure can comprise a yeast microorganism, a cyanobacterium microorganism, or a bacterial microorganism. Generally, bacterial microorganisms are categorized by differentiating bacterial species into gram positive or gram negative species. The gram staining is used to identify bacterial strains that contain peptidoglycan in the cell wall. This microbiological procedure is commonly known in the art, and would be appreciated as a common categorical process by those persons having ordinary skill in the art.

[0079] Heterologous expression of an enzyme and production of a biosurfactant in certain species of microorganisms can result in altered properties of the biosurfactant. For example, the chain length of the fatty acid of a biosurfactant may vary, in part, due to the microorganism that it is produced from. In addition, the fatty acid chain may be branched or contain additional chemical moieties (i.e., hydroxylation, acylation, alkylation, oxidation, etc.) thereby altering the chemical structure of the fatty acid moiety of a biosurfactant and further altering the functionality of the biosurfactant (i.e., length of fatty acid, charge, solubility in water, molecular weight, etc.). The microorganism from which the biosurfactant is produced will impart such properties on the biosurfactant. In certain embodiments of the subject disclosure the microorganism is engineered to acylate an amino acid (i.e., glycine) to a biosurfactant. In such embodiments, the microorganism is metabolically engineered to acylate the amino acid (i.e., glycine) to the biosurfactant.

[0080] In certain embodiments the amino acid, glycine, is acylated to a fatty acid (i.e., acyl-coA) to produce an N-acylglycine biosurfactant. In certain embodiments, the amino acid glycine is recruited into a medium chain-length β-hydroxy fatty acid peptide chain. “Beta-hydroxy fatty acids” are fatty acids (i.e., acyl-coA) comprising a hydroxy group at the third carbon (i.e., the beta position) of the fatty acid chain. Typically, the carboxylate moiety of the fatty acid is covalently attached to the nitrogen of the amino acid such that the beta position corresponds to the carbon two carbons removed from the carbon having the ester group. “Medium chain length” beta-hydroxy fatty acids may be in length of 3, 4, 5, 6, 7, 8, 9, 10, 11, 12, 3, 14, 15, 16, 17, 18, 19, 20, 21, 22, 23, 24, 25 or more carbon atoms. In some embodiments the amino acid glycine is linked to the beta-hydroxy fatty acids to produce an N-acylglycine surfactant in the length of 3, 4, 5, 6, 7, 8, 9, 10, 11, 12, 3, 14, 15, 16, 17, 18, 19, 20, 21, 22, 23, 24, 25 or more carbon atoms. In additional embodiments the amino acid glycine is covalently linked to the beta-hydroxy fatty acids to produce an N-acylglycine surfactant in the length of 3, 4, 5, 6, 7, 8, 9, 10, 11, 12, 3, 14, 15, 16, 17, 18, 19, 20, 21, 22, 23, 24, 25 or more carbon atoms.

[0081] In additional embodiments, the N-acylglycine surfactant may contain linear carbon chains, in which each carbon of the chain, with the exception of the terminal carbon atom and the carbon attached to the nitrogen of the amino acid, is directly covalently linked to two other carbon atoms. Additionally or alternatively, N-acylglycine surfactant may contain branched carbon chains, in which at least one carbon of the chain is directly covalently linked to three or more other carbon atoms. N-acylglycine surfactant may contain one or more double bonds between adjacent carbon atoms. Alternatively, N-acylglycine surfactant may contain only single-bonds between adjacent carbon atoms. Furthermore, different beta-hydroxy fatty acid linkage domains that exhibit specificity for other beta-hydroxy fatty acids (e.g., naturally or non-naturally occurring beta-hydroxy fatty acids) may be used to generate the N-acylglycine surfactant.

[0082] The fatty acid of a microorganism can vary, depending upon the bacterial strain, growth media, cultivation conditions, etc. Most bacteria produce straight-chain fatty acids with or without unsaturation in the carbon chain (myristic, palmitic, stearic, oleic, and linoleic acids). Branched-chain fatty acids with a methyl group at the penultimate (iso-) or the antepenultimate (anteiso-) positions are relatively uncommon but are the major constituents of lipids in gram positive bacteria such as Bacillus subtilis.

[0083] In B. subtilis, branched-chain fatty acids account for >90% of the total fatty acid pool (Roberts, 1994, IJSB, B. mojavensis—distinguishable from B. subtilis, V44(2), p. 256-264). Anteiso-fatty acids (anteiso-C15 and anteiso-C17 at about 40.19%±3.98% and 9.38%±0.95%, respectively) are the most abundant, with anteiso-C15 fatty acids being the single most abundant fatty acid in B. subtilis. The odd-numbered iso-fatty acids (iso-C15 and iso-C17 at about 29.27%±4.64% and 9.59%±1.56%, respectively) are next in order of abundance. The even-numbered iso-(iso-C14 and iso-C16 at about 1.13%±0.24% and 2.36%±0.34%, respectively) and straight-chain (n-C14 at about a concentration not currently measured and n-C16 at about 3.14%±0.40%) fatty acids are of relatively low abundance. Unsaturated fatty acids account for a small fraction of the lipid content in B. subtilis with C16:1 cis9, C16:1 cis5, and iso-C17:1 cis7 at about 0.23%±0.35%, 1.52%±0.45%, and 1.72% f 0.42%, respectively.

[0084] The observed trend in fatty composition in B. subtilis is also generally conserved across other species within the Bacillus genus such as B. alvei, B. amyloliquefaciens, B. atrophaeus, B. brevis, B. circulans, B. licheniformis, B. macerans, B. megaterium and B. pumilus (Kaneda, 1967, J. Bac., Fatty acids in the Genus Bacillus: Iso- and anteiso-fatty acids as characteristic constituents, V93(3), p. 894-903). Anteiso-fatty acids (anteiso-C15 and anteiso-C17) are typically the most abundant and anteiso-C15 fatty acid is the single most abundant fatty acid in B. subtilis. The odd-numbered iso-fatty acids (iso-C15 and iso-C17) are next in order of abundance, and the even-numbered iso- (iso-C14 and iso-C16) and straight-chain (n-C14 and n-C16) fatty acids are of relatively low and variable abundance, respectively.

[0085] In E. coli, the majority of the fatty acids (FA) produced are straight-chain and range from C14-C18 in carbon length (Sullivan, 1979, J. Bac, Alteration of FA composition of E. coli by growth in presence of alcohols, V138(1), p. 133-138; Shaw, 1965, J. Bac., Fatty acid composition of E. coli as a possible control factor of minimal growth temperature, V90(1), p. 141-146). The fatty acids of C16 length (C16:0 at about 30.95-38.6% and C16:1 at about 27.9-31.45%) are the most abundant pair of acids in E. coli. Unsaturated, C18 fatty acid (C18:1 at about 19.5-27.1%) is next in order of abundance while C14 and C17 fatty acids were of relatively low abundance at about 5.1-5.5% and 3-4.9%, respectively.

[0086] In embodiments the N-acylglycine surfactant produced in a microorganism can be composed of an N-acylglycine surfactant comprising, but not limited to: anteiso-C15-N-acylglycine surfactant; anteiso-C17-N-acylglycine surfactant; iso-C15-N-acylglycine surfactant; iso-C17-N-acylglycine surfactant; iso-C14-N-acylglycine surfactant; iso-C16-N-acylglycine surfactant; straight-chain-C14-N-acylglycine surfactant; straight-chain-C16-N-acylglycine surfactant; straight-chain-C17-N-acylglycine surfactant; C16:1 cis9-N-acylglycine surfactant; C16:1 cis5-N-acylglycine surfactant; unsaturated-C18:1-N-acylglycine surfactant; C16-N-acylglycine surfactant; C16:1-N-acylglycine surfactant; and, iso-C17:1 cis7-N-acylglycine surfactant. In further embodiments, the N-acylglycine surfactant produced in a microorganism can be composed of an N-acylglycine surfactant comprising the 3-OH—C15-GLY isomer 1-N-acylglycine surfactant of FIG. 8 and the 3-OH—C15-GLY isomer 2-N-acylglycine surfactant of FIG. 8. In additional embodiments, the N-acylglycine surfactant produced in a microorganism can be composed of; linear-C13-N-acylglycine surfactant, iso-C13-N-acylglycine surfactant, anteiso-C13-N-acylglycine surfactant, linear-C14-N-acylglycine surfactant, iso-C14-N-acylglycine surfactant, iso-C15-N-acylglycine surfactant, anteiso-C15-N-acylglycine surfactant, and iso-C16-N-acylglycine surfactant. As described above, the pool of fatty acids are known to be produced in the microorganism, and can serve as a pool of fatty acids that can be converted by a chimeric nonribosomal peptide synthetase enzymatic protein of the subject disclosure into an N-acylglycine surfactant, wherein the N-acylglycine surfactant is comprised of a varying chain lengths, branching and addition of chemical moieties. The production of such N-acylglycine surfactant molecules are taught herein as an embodiment of the subject disclosure.

[0087] An NRPS protein is a modular multi-domain enzyme that can selectively bind and condense amino acids to enzymatically produce products of varied structural and functional diversity. The number of modules and their organization comprising the NRPS determines the primary structure of the corresponding peptide products. A component of each module of the NRPS machinery is an ‘adenylation domain (A-domain)’ that recognizes a specific amino acid building block and recruits the amino acid to a peptidyl or amino-acyl chain. Disclosed herein are compositions and methods for exchanging the native A-domain of a NRPS protein for a glycine specific A domain. Accordingly, the resulting chimeric NRPS fusion protein was designed to specifically recognize the amino acid glycine. Unexpectedly, the chimeric NRPS fusion protein successfully enabled the in vivo acylation of the amino acid glycine into a medium chain-length β-hydroxy fatty acid peptide chain. As such, when the chimeric NRPS fusion protein was expressed in a prokaryotic species, the bacterial strain was cultured and fermented to result in the production of the non-native lipoamino acid, N-acylglycine biosurfactant. Disclosed herein are embodiments of novel, chimeric NRPS fusion proteins and polynucleotides which encode such proteins.

[0088] In an embodiment, the subject disclosure relates to a fusion protein comprising a glycine-specific adenylation domain. By being “glycine specific”, the A-domain of the disclosure only incorporates the amino acid glycine into a medium chain-length β-hydroxy fatty acid peptide chain. The ‘adenylation domain (A-domain)’ recognizes specific amino acid building block that it activates by adenylation and recruits into a growing peptidyl or aminoacyl chain. Exemplary glycine specific adenylation domains are disclosed herein and include the DHBF protein sequence (SEQ ID NO:9) or the dhbF coding sequence (Table 1); the BAEJ protein sequence (SEQ ID NO:90) or the baeJ coding sequence (Table 1); the PKSJ (BSU17180) protein sequence (SEQ ID NO:11) or the pksJ (BSU17180) coding sequence (Table 1); the DptA protein sequence (SEQ ID NO:92) or the dptA coding sequence coding sequence (Table 1); and, the DptBC protein sequence (SEQ ID NO:94) or the dptBC coding sequence (Table 1). Disclosed herein as an embodiment are glycine specific adenylation domains comprising a protein sequence that shares at least 80%, 82.5%, 87.5%, 90%, 92.5%, 95%, 97.5%, 99%, or 99.5% sequence identity with SEQ ID NO:1.0. Further disclosed as an embodiment are glycine specific adenylation domains comprising a protein sequence that shares at least 80%, 82.5%, 87.5%, 90%, 92.5%, 95%, 97.5%, 99%, or 99.5% sequence identity with SEQ ID NO:12. Disclosed as an embodiment are glycine specific adenylation domains comprising a protein sequence that shares at least 80%, 82.5%, 87.5%, 90%, 92.5%, 95%, 97.5%, 99%, or 99.5% sequence identity with SEQ ID NO:58. Disclosed as an embodiment are glycine specific adenylation domains comprising a protein sequence that shares at least 80%, 82.5%, 87.5%, 90%, 92.5%, 95%, 97.5%, 99%, or 99.5% sequence identity with SEQ ID NO:59. Disclosed as an embodiment are glycine specific adenylation domains comprising a protein sequence that shares at least 80%, 82.5%, 87.5%, 90%, 92.5%, 95%, 97.5%, 99%, or 99.5% sequence identity with SEQ ID NO:60. Disclosed as an embodiment are glycine specific adenylation domains comprising a protein sequence that shares at least 80%, 82.5%, 87.5%, 90%, 92.5%, 95%, 97.5%, 99%, or 99.5% sequence identity with SEQ ID NO:61. Disclosed as an embodiment are glycine specific adenylation domains comprising a protein sequence that shares at least 80%, 82.5%, 87.5%, 90%, 92.5%, 95%, 97.5%, 99%, or 99.5% sequence identity with SEQ ID NO:62. Disclosed as an embodiment are glycine specific adenylation domains comprising a protein sequence that shares at least 80%, 82.5%, 87.5%, 90%, 92.5%, 95%, 97.5%, 99%, or 99.5% sequence identity with SEQ ID NO:63. Disclosed as an embodiment are glycine specific adenylation domains comprising a protein sequence that shares at least 80%, 82.5%, 87.5%, 90%, 92.5%, 95%, 97.5%, 99%, or 99.5% sequence identity with SEQ ID NO:64. Disclosed as an embodiment are glycine specific adenylation domains comprising a protein sequence that shares at least 80%, 82.5%, 87.5%, 90%, 92.5%, 95%, 97.5%, 99%, or 99.5% sequence identity with SEQ ID NO:65. Disclosed as an embodiment are glycine specific adenylation domains comprising a protein sequence that shares at least 80%, 82.5%, 87.5%, 90%, 92.5%, 95%, 97.5%, 99%, or 99.5% sequence identity with SEQ ID. NO:66. Disclosed as an embodiment are glycine specific adenylation domains comprising a protein sequence that shares at least 80%, 82.5%, 87.5%, 90%, 92.5%, 95%, 97.5%, 99%, or 99.5% sequence identity with SEQ ID NO:91. Disclosed as an embodiment are glycine specific adenylation domains comprising a protein sequence that shares at least 80%, 82.5%, 87.5%, 90%, 92.5%, 95%, 97.5%, 99%, or 99.5% sequence identity with SEQ ID NO:93. Disclosed as an embodiment are glycine specific adenylation domains comprising a protein sequence that shares at least 80%, 82.5%, 87.5%, 90%, 92.5%, 95%, 97.5%, 99%, or 99.5% sequence identity with SEQ ID NO:95. Further disclosed as an embodiment are glycine specific adenylation domains comprising a polynucleotide sequence that shares at least 80%, 82.5%, 87.5%, 90%, 92.5%, 95%, 97.5%, 99%, or 99.5% sequence identity with SEQ ID NO:49. Disclosed as an embodiment are glycine specific adenylation domains comprising a polynucleotide sequence that shares at least 80%, 82.5%, 87.5%, 90%, 92.5%, 95%, 97.5%, 99%, or 99.5% sequence identity with SEQ ID NO:52.

[0089] Furthermore, as an embodiment the specific glycine adenylation domain may embody a protein motif. In a subsequent embodiment, the specific glycine adenylation domain is aligned with the gramicidin S synthetase (GrsA) phenylalanine activating domain (Challis G L, Ravel J, Townsend C A. Predictive, structure-based model of amino acid recognition by nonribosomal peptide synthetase adenylation domains. Chem Biol. 2000 March; 7(3):211-24; and, Stachelhaus T, Mootz H D, Marahiel M A. The specificity-conferring code of adenylation domains in nonribosomal peptide synthetases. Chem Biol. 1999 August; 6(8):493-50). In an embodiment, the resulting alignment of the specific glycine adenylation domain with GrsA results in a protein motif of SEQ ID NO:42 wherein: D aligns at amino acid residue 235 of GrsA; I aligns at amino acid residue 236 of GrsA; L aligns at amino acid residue 239 of GrsA; Q aligns at amino acid residue 278 of GrsA; L aligns at amino acid residue 299 of GrsA; G aligns at amino acid residue 301 of GrsA; V aligns at amino acid residue 322 of GrsA; I aligns at amino acid residue 330 of GrsA; W aligns at amino acid residue 331 of GrsA; and, K aligns at amino acid residue 517 of GrsA. The protein motif of SEQ ID NO:42 is included as an embodiment of this disclosure. In an embodiment, the resulting alignment of the specific glycine adenylation domain with GrsA results in a protein motif of SEQ ID NO:41 wherein: D aligns at amino acid residue 235 of GrsA; I aligns at amino acid residue 236 of GrsA; L aligns at amino acid residue 239 of GrsA; Q aligns at amino acid residue 278 of GrsA; L aligns at amino acid residue 299 of GrsA; G aligns at amino acid residue 301 of GrsA; L aligns at amino acid residue 322 of GrsA; I aligns at amino acid residue 330 of GrsA; W aligns at amino acid residue 331 of GrsA; and, K aligns at amino acid residue 517 of GrsA. The protein motif of SEQ ID NO:41 is included as an embodiment of this disclosure. In a further embodiment, the resulting alignment of the specific glycine adenylation domain with GrsA results in a protein motif of SEQ ID NO:40 wherein: D aligns at amino acid residue 235 of GrsA; I aligns at amino acid residue 236 of GrsA; L aligns at amino acid residue 239 of GrsA; Q aligns at amino acid residue 278 of GrsA; L aligns at amino acid residue 299 of GrsA; G aligns at amino acid residue 301 of GrsA; M aligns at amino acid residue 322 of GrsA; I aligns at amino acid residue 330 of GrsA; W aligns at amino acid residue 331 of GrsA; and, K aligns at amino acid residue 517 of GrsA. The protein motif of SEQ ID NO:40 is included as an embodiment of this disclosure. In an additional embodiment, the resulting alignment of the specific glycine adenylation domain with GrsA results in a protein motif of SEQ ID NO:89 wherein: D aligns at amino acid residue 235 of GrsA; I aligns at amino acid residue 236 of GrsA; L aligns at amino acid residue 239 of GrsA; Q aligns at amino acid residue 278 of GrsA; V aligns at amino acid residue 299 of GrsA; G aligns at amino acid residue 301 of GrsA; M aligns at amino acid residue 322 of GrsA; I aligns at amino acid residue 330 of GrsA; W aligns at amino acid residue 331 of GrsA; and, K aligns at amino acid residue 517 of GrsA. The protein motif of SEQ ID NO:89 is included as an embodiment of this disclosure. In an embodiment, the resulting alignment of the specific glycine adenylation domain with GrsA results in a protein motif of SEQ ID NO:1 wherein: D aligns at amino acid residue 235 of GrsA; I aligns at amino acid residue 236 of GrsA; L aligns at amino acid residue 239 of GrsA; Q aligns at amino acid residue 278 of GrsA; L or V align at amino acid residue 299 of GrsA; G aligns at amino acid residue 301 of GrsA; L or M or V align at amino acid residue 322 of GrsA; I aligns at amino acid residue 330 of GrsA; W aligns at amino acid residue 331 of GrsA; and, K aligns at amino acid residue 517 of GrsA. The protein motif of SEQ ID NO:1 is included as an embodiment of this disclosure. Upon completion of an alignment and analysis of the glycine adenylation protein domain sequence with gramicidin S synthetase (GrsA) phenylalanine activating domain, several protein motifs were identified that defined conserved regions that are designated as consensus sequences. These five consensus sequences (SEQ ID NO:42, SEQ ID NO:41, SEQ ID NO:40, SEQ ID NO:1 and SEQ ID NO:89) were determined to define motifs that are characteristic of glycine adenylation protein. Using these motifs to search databases (e.g. GeneBank), one practiced in the art may identify additional putative glycine adenylation genes or proteins from a variety of different organisms.

[0090] In further embodiments, the glycine adenylation domain is operably linked to a second domain. For example, the glycine adenylation domain may be operably linked to another NRPS domain. Exemplary NRPS domains may include a condensation domain, a peptidyl carrier protein domain, a thioesterase domain, and/or the type II thioesterase domain.

[0091] Disclosed herein as an embodiment is a condensation domain comprising a polynucleotide sequence that shares at least 80%, 82.5%, 87.5%, 90%, 92.5%, 95%, 97.5%, 99%, or 99.5% sequence identity with SEQ ID NO:50. Disclosed herein as an embodiment is a condensation domain comprising a polynucleotide encoding a polypeptide sequence that shares at least 80%, 82.5%, 87.5%, 90%, 92.5%, 95%, 97.5%, 99%, or 99.5% sequence identity with SEQ ID NO:67. Disclosed herein as an embodiment is a condensation domain comprising a polynucleotide encoding a polypeptide sequence that shares at least 80%, 82.5%, 87.5%, 90%, 92.5%, 95%, 97.5%, 99%, or 99.5% sequence identity with SEQ ID NO:68. Disclosed herein as an embodiment is a condensation domain comprising a polynucleotide encoding a polypeptide sequence that shares at least 80%, 82.5%, 87.5%, 90%, 92.5%, 95%, 97.5%, 99%, or 99.5% sequence identity with SEQ ID NO:69. Disclosed herein as an embodiment is a condensation domain comprising a polynucleotide encoding a polypeptide sequence that shares at least 80%, 82.5%, 87.5%, 90%, 92.5%, 95%, 97.5%, 99%, or 99.5% sequence identity with SEQ ID NO:70. Disclosed herein as an embodiment is a condensation domain comprising a polynucleotide encoding a polypeptide sequence that shares at least 80%, 82.5%, 87.5%, 90%, 92.5%, 95%, 97.5%, 99%, or 99.5% sequence identity with SEQ ID NO:71. Disclosed herein as an embodiment is a condensation domain comprising a polynucleotide encoding a polypeptide sequence that shares at least 80%, 82.5%, 87.5%, 90%, 92.5%, 95%, 97.5%, 99%, or 99.5% sequence identity with SEQ ID NO:72. Disclosed herein as an embodiment is a condensation domain comprising a polynucleotide encoding a polypeptide sequence that shares at least 80%, 82.5%, 87.5%, 90%, 92.5%, 95%, 97.5%, 99%, or 99.5% sequence identity with SEQ ID NO:73. Disclosed herein as an embodiment is a condensation domain comprising a polynucleotide encoding a polypeptide sequence that shares at least 80%, 82.5%, 87.5%, 90%, 92.5%, 95%, 97.5%, 99%, or 99.5% sequence identity with SEQ ID NO:74. Disclosed herein as an embodiment is a condensation domain comprising a polynucleotide encoding a polypeptide sequence that shares at least 80%, 82.5%, 87.5%, 90%, 92.5%, 95%, 97.5%, 99%, or 99.5% sequence identity with SEQ ID NO:75. Disclosed herein as an embodiment is a condensation domain comprising a polynucleotide encoding a polypeptide sequence that shares at least 80%, 82.5%, 87.5%, 90%, 92.5%, 95%, 97.5%, 99%, or 99.5% sequence identity with SEQ ID NO:76.

[0092] Disclosed herein as an embodiment is a peptidyl carrier protein domain comprising a polynucleotide sequence that shares at least 80%, 82.5%, 87.5%, 90%, 92.5%, 95%, 97.5%, 99%, or 99.5% sequence identity with SEQ ID NO:51. Disclosed herein as an embodiment is a peptidyl carrier protein domain comprising a polynucleotide encoding a polypeptide sequence that shares at least 80%, 82.5%, 87.5%, 90%, 92.5%, 95%, 97.5%, 99%, or 99.5% sequence identity with SEQ ID NO:77. Disclosed herein as an embodiment is a peptidyl carrier protein domain comprising a polynucleotide encoding a polypeptide sequence that shares at least 80%, 82.5%, 87.5%, 90%, 92.5%, 95%, 97.5%, 99%, or 99.5% sequence identity with SEQ ID NO:78. Disclosed herein as an embodiment is a peptidyl carrier protein domain comprising a polynucleotide encoding a polypeptide sequence that shares at least 80%, 82.5%, 87.5%, 90%, 92.5%, 95%, 97.5%, 99%, or 99.5% sequence identity with SEQ ID NO:79. Disclosed herein as an embodiment is a peptidyl carrier protein domain comprising a polynucleotide encoding a polypeptide sequence that shares at least 80%, 82.5%, 87.5%, 90%, 92.5%, 95%, 97.5%, 99%, or 99.5% sequence identity with SEQ ID NO:80. Disclosed herein as an embodiment is a peptidyl carrier protein domain comprising a polynucleotide encoding a polypeptide sequence that shares at least 80%, 82.5%, 87.5%, 90%, 92.5%, 95%, 97.5%, 99%, or 99.5% sequence identity with SEQ ID NO:81. Disclosed herein as an embodiment is a peptidyl carrier protein domain comprising a polynucleotide encoding a polypeptide sequence that shares at least 80%, 82.5%, 87.5%, 90%, 92.5%, 95%, 97.5%, 99%, or 99.5% sequence identity with SEQ ID NO:82. Disclosed herein as an embodiment is a peptidyl carrier protein domain comprising a polynucleotide encoding a polypeptide sequence that shares at least 80%, 82.5%, 87.5%, 90%, 92.5%, 95%, 97.5%, 99%, or 99.5% sequence identity with SEQ ID NO:83. Disclosed herein as an embodiment is a peptidyl carrier protein domain comprising a polynucleotide encoding a polypeptide sequence that shares at least 80%, 82.5%, 87.5%, 90%, 92.5%, 95%, 97.5%, 99%, or 99.5% sequence identity with SEQ ID NO:84. Disclosed herein as an embodiment is a peptidyl Carrier protein domain comprising a polynucleotide encoding a polypeptide sequence that shares at least 80%, 82.5%, 87.5%, 90%, 92.5%, 95%, 97.5%, 99%, or 99.5% sequence identity with SEQ ID NO:85. Disclosed herein as an embodiment is a peptidyl carrier protein domain comprising a polynucleotide encoding a polypeptide sequence that shares at least 80%, 82.5%, 87.5%, 90%, 92.5%, 95%, 97.5%, 99%, or 99.5% sequence identity with SEQ ID NO:86.

[0093] Disclosed herein as an embodiment is a thioesterase domain comprising a polynucleotide sequence that shares at least 80%, 82.5%, 87.5%, 90%, 92.5%, 95%, 97.5%, 99%, or 99.5% sequence identity with SEQ ID NO:51. Disclosed herein as an embodiment is a thioesterase domain comprising a polynucleotide encoding a polypeptide sequence that shares at least 80%, 82.5%, 87.5%, 90%, 92.5%, 95%, 97.5%, 99%, or 99.5% sequence identity with SEQ ID NO:87. Disclosed herein as an embodiment is a thioesterase domain comprising a polynucleotide encoding a polypeptide sequence that shares at least 80%, 82.5%, 87.5%, 90%, 92.5%, 95%, 97.5%, 99%, or 99.5% sequence identity with SEQ ID NO:88.

[0094] The above described exemplary NRPS domains are found as surfactant gene cluster in microorganisms. For instance Bacillus subtilis contains a surfactant gene cluster. In an embodiment, the surfactant gene clusters obtained from Bacillus subtilis may comprise theSrfAA-M3 (SEQ ID NO:4), SrfAA-M2 (SEQ ID NO:3), SrfAA-M1 (SEQ ID NO:2), SrfAB-M6 (SEQ ID NO:7), SrfAB-M5 (SEQ ID NO:6), SrfAB-M4 (SEQ ID NO:5), and SrfAC-M7 (SEQ ID NO:8) gene clusters.

[0095] Disclosed herein are chimeric NRPS fusion proteins that contain a glycine adenylation domain fused to a condensation domain, a peptidyl carrier protein domain, a thioesterase domain, and/or the type II thioesterase domain. The introduction of the glycine adenylation domain at a location between the condensation domain and peptidyl carrier protein domain requires that no modifications result in the alteration of secondary or tertiary structure of the protein sequence, such that the fidelity of the chimeric NRPS fusion protein is modified. Such an alteration could result in instability of the protein or decreased expression levels of the protein. Accordingly, an embodiment of the subject disclosure is the identification of a junction sequence located between the adenylation domain and the condensation domain that allows for integration and engineering of the glycine specific adenylation domain downstream of the condensation domain. In an embodiment, the glycine adenylation domain is operably linked to the condensation domain at the amino acid sequence of SEQ ID NO:53—SDAEKQM, wherein E comprises the junction between the glycine adenylation domain and the condensation domain. In an embodiment, the glycine adenylation domain is operably linked to the condensation domain at the amino acid sequence of SEQ ID NO:54—TLISDAEK, wherein E comprises the junction between the glycine adenylation domain and the condensation domain. In yet another embodiment of the subject disclosure is the identification of a junction sequence located between the adenylation domain and the peptidyl carrier protein domain that allows for integration and engineering of the glycine specific adenylation domain upstream of the peptidyl carrier protein domain. In an embodiment, the glycine adenylation domain is operably linked to the peptidyl carrier protein domain at the amino acid sequence of SEQ ID NO:55—IEWDDDFFAL, wherein the third D comprises the junction between the glycine adenylation domain and the peptidyl carrier protein domain. In an embodiment, the glycine adenylation domain is operably linked to the peptidyl carrier protein domain at the amino acid sequence of SEQ ID NO:56—RVGIDDDFFALG, wherein the third D comprises the junction between the glycine adenylation domain and the peptidyl carrier protein domain. In an embodiment, the glycine adenylation domain is operably linked to the peptidyl carrier protein domain at the amino acid sequence of SEQ ID NO:57—WQEVLNVEKAGIF, wherein the N comprises the junction between the glycine adenylation domain and the peptidyl carrier protein domain.

[0096] In a further embodiment of the subject disclosure the chimeric fusion NRPS protein is encoded on a polynucleotide of BSU3a (SEQ ID NO:13), BSU4a (SEQ ID NO:14), and dhbF3a (SEQ ID NO:15). In a subsequent embodiment, the chimeric fusion NRPS polynucleotide shares at least 85%, 87.5%, 90%, 92.5%, 95%, 97.5%, 99% or 99.5 with SEQ ID NO:13. In a subsequent embodiment, the chimeric fusion NRPS polynucleotide shares at least 85%, 87.5%, 90%, 92.5%, 95%, 97.5%, 99% or 99.5 with SEQ ID NO:14. In a subsequent embodiment, the chimeric fusion NRPS polynucleotide shares at least 85%, 87.5%, 90%, 92.5%, 95%, 97.5%, 99% or 99.5 with SEQ ID NO:15.

[0097] The genes that encode peptide synthetase complexes have a modular structure that parallels the functional domain structure of the complexes (see, for example, Cosmina et al., Mol. Microbiol. 8:821, 1993; Kratzxchmar et al., J. Bacteriol. 171:5422, 1989; Weckermann et al., Nuc. Acids res. 16:11841, 1988; Smith et al., EMBO J. 9:741, 1990; Smith et al., EMBO J. 9:2743, 1990; MacCabe et al., J. Biol. Chem. 266:12646, 1991; Coque et al., Mol. Microbiol. 5:1125, 1991; Diez et al., J. Biol. Chem. 265:16358, 1990).

[0098] Hundreds of peptides are known to be produced by peptide synthetase complexes. Such nonribosomally-produced peptides often have non-linear structures, including cyclic structures exemplified by the peptides surfactant (i.e., surfactin), cyclosporin, tyrocidin, and mycobacillin, or branched cyclic structures exemplified by the peptides polymyxin and bacitracin. Moreover, such nonribosomally-produced peptides may contain amino acids not usually present in ribosomally-produced polypeptides such as for example norleucine, beta-alanine and/or ornithine, as well as D-amino acids. Additionally or alternatively, such nonribosomally-produced peptides may comprise one or more non-peptide moieties that are covalently linked to the peptide. As one non-limiting example, surfactant (i.e., surfactin) is a cyclic lipopeptide that comprises a beta-hydroxy fatty acid covalently linked to the first glutamate of the lipopeptide. Other non-peptide moieties that are covalently linked to peptides produced by peptide synthetase complexes are known to those skilled in the art, including for example sugars, chlorine or other halogen groups, N-methyl and N-formyl groups, glycosyl groups, acetyl groups, etc.

[0099] In an embodiment of the subject disclosure, expression of the chimeric NRPS fusion protein is driven by a bacterial promoter. Exemplary promoters are known to those with ordinary skill in the art, and may include a pTAC promoter, a LAC promoter, TAC II promoter, or a PsrfA promoter amongst other commonly known bacterial promoters. Exemplary promoters may be constitutive or inducible. In an embodiment the chimeric NRPS fusion protein is operably linked to a bacterial promoter.

[0100] In further embodiments, a chimeric NRPS fusion protein operably linked to a bacterial promoter may be cloned into a vector that can then be transformed into the bacterial host cell. Other regulatory elements may be included in a vector (also termed “expression construct”). Such elements include, but are not limited to, for example, transcriptional enhancer sequences, translational enhancer sequences, other promoters, activators, translational start and stop signals, transcription terminators, cistronic regulators, polycistronic regulators, tag sequences, such as nucleotide sequence “tags” and “tag” polypeptide coding sequences, which facilitates identification, separation, purification, and/or isolation of an expressed.

[0101] A polypeptide encoding gene according to the present disclosure can include, in addition to the protein coding sequence, the following regulatory elements operably linked thereto: a promoter, a ribosome binding site (RBS), a transcription terminator, translational start and stop signals. Useful RBSs can be obtained from any of the species useful as host cells in expression systems according to the present disclosure, preferably from the selected host cell. Many specific and a variety of consensus RBSs are known, e.g., those described in and referenced by D. Frishman et al., Starts of bacterial genes: estimating the reliability of computer predictions, Gene 234(2):257-65 (8 Jul. 1999); and B. E. Suzek et al., A probabilistic method for identifying start codons in bacterial genomes, Bioinformatics 17(12): 1123-30 (December 2001). In addition, either native or synthetic RBSs may be used, e.g., those described in: EP 0207459 (synthetic RBSs); O. Ikehata et al., Primary structure of nitrile hydratase deduced from the nucleotide sequence of a Rhodococcus species and its expression in Escherichia coli, Eur. J. Biochem. 181(3):563-70 (1989)(native RBS sequence of AAGGAAG). Further examples of methods, vectors, and translation and transcription elements, and other elements useful in the present disclosure are described in, e.g.: U.S. Pat. No. 5,055,294 to Gilroy and U.S. Pat. No. 5,128,130 to Gilroy et al.; U.S. Pat. No. 5,281,532 to Rammler et al.; U.S. Pat. Nos. 4,695,455 and 4,861,595 to Barnes et al.; U.S. Pat. No. 4,755,465 to Gray et al.; and U.S. Pat. No. 5,169,760 to protein Wilcox

[0102] Vectors are known in the art for expressing recombinant proteins in host cells, and any of these may be used for expressing the genes according to the present disclosure. The plasmid vectors may autonomously replicate within the bacterial strain with or without the use of an antibiotic selection agent. Such vectors include, e.g., plasmids, cosmids, and phage expression vectors. Examples of useful plasmid vectors include, but are not limited to, the expression plasmids pBBR1MCS, pDSK519, pKT240, pML122, pPS10, RK2, RK6, pR01600, and RSF1010. Further examples can include pALTER-Ex1, pALTER-Ex2, pBAD/His, pBAD/Myc-His, pBAD/gIII, pCal-n, pCal-n-EK, pCal-c, pCal-Kc, pcDNA 2.1, pDUAL, pET-3a-c, pET 9a-d, pET-1 pET-12a-c, pET-14b, pET15b, pET-16b, pET-17b, pET-19b, pET-20b(+), pET-21a-d(+), pET-22b(+), pET-23a-d(+), pET24a-d(+), pET-25b(+), pET-26b(+), pET-27b(+), pET28a-c(+), pET-29a-c(+), pET-30a-c(+), pET31b(+), pET-32a-c(+), pET-33b(+), pET-34b(+), pET35b(+), pET-36b(+), pET-37b(+), pET-38b(+), pET-39b(+), pET-40b(+), pET411a-c(+), pET-42a-c(+pET43a-c(+), pETBlue-1, pETBlue-2, pETBlue-3, pGEMEX-1, pGEMEX-2, pGEX1λT, pGEX-2T, pGEX-2TK, pGEX-3X, pGEX4T, pGEX-5X, pGEX-6P, pHAT10/11/12, pHAT20, pHAT-GFPuv, pKK223-3, pLEX, pMAL-c2X, pMAL-c2E, pMAL-c2g, pMAL-p2X, pMAL-p2E, pMAL-p2G, pProEX HT, pPROLar.A, pPROTet.E, pQE-9, pQE-16, pQE-30/31/32, pQE40, pQE-50, pQE-70, pQE-80/81/82L, pQE-100, pRSET, and pSE280, pSE380, pSE420, pThioHis, pTrc99A, pTrcHis, pTrcHis2, pTriEx-1, pTriEx-2, pTrxFus. Other examples of such useful vectors include those described by, e.g.: N. Hayase, in Appl. Envir. Microbiol. 60(9):3336-42 (September 1994); A. A. Lushnikov et al., in Basic Life Sci. 30:657-62 (1985); S. Graupner & W. Wackemagel, in Biomblec. Eng. 17(1):11-16. (October 2000); H. P. Schweizer, in Curr. Opin. Biotech. 12(5):439-45 (October 2001); M. Bagdasarian & K. N. Timmis, in Curr. Topics Microbiol. Immunol. 96:47-67 (1982); T. Ishii et al., in FEMS Microbiol. Lett. 116(3):307-13 (Mar. 1, 1994); I. N. Olekhnovich & Y. K. Fomichev, in Gene 140(1):63-65 (Mar. 11, 1994); M. Tsuda & T. Nakazawa, in Gene 136(1-2):257-62 (Dec. 22, 1993); C. Nieto et al., in Gene 87(1):145-49 (Mar. 1, 1990); J. D. Jones & N. Gutterson, in Gene 61(3):299-306 (1987); M. Bagdasarian et al., in Gene 16(1-3):237-47 (December 1981); H. P. Schweizer et al., in Genet. Eng. (NY) 23:69-81 (2001); P. Mukhopadhyay et al., in J. Bact. 172(1):477-80 (January 1990); D. O. Wood et al., in J. Bact. 145(3):1448-51 (March 1981); and R. Holtwick et al., in Microbiology 147(Pt 2):337-44 (February 2001). In addition, Bacillus plasmids, e.g., pDG1662 plasmid, may be obtained from the Bacillus Genetic Stock Center; Biological Sciences 556, 484 W. 12th Ave, Columbus, Ohio 43210-1214.

[0103] Transformation of the host cells with the vector(s) disclosed herein may be performed using any transformation methodology known in the art, and the bacterial host cells may be transformed as intact cells or as protoplasts (i.e. including cytoplasts). Exemplary transformation methodologies include ‘poration methodologies, e.g., electroporation, protoplast fusion, bacterial conjugation, and divalent cation treatment (calcium chloride CaCl₂ treatment or CaCl₂/Mg²⁺ treatment), or other well known methods in the art. See, e.g., Morrison, J. Bact., 132:349-351 (1977); Clark-Curtiss & Curtiss, Methods in Enzymology, 101:347-362 (Wu et al., eds, 1983), Sambrook et al., Molecular Cloning, A Laboratory Manual (2nd ed. 1989); Kriegler, Gene Transfer and Expression: A Laboratory Manual (1990); and Current Protocols in Molecular Biology (Ausubel et al., eds., 1994)). Other known transformation methods specific are described at by Guerout-Fleury, A. M., Frandsen, N. and Stragier, P. (1996) Plasmids for ectopic integration in Bacillus subtilis. Gene 180 (1-2), 57-61.

[0104] Embodiments of the disclosure include methods for identifying any neutral site within the bacterial microorganism (i.e., Bacillus subtilis) genome and the integration of a polynucleotide containing a gene expression cassette which is stably expressed.

[0105] Other embodiments of the present disclosure can include integrating a polynucleotide into the bacterial microorganism (i.e., Bacillus subtilis) genome without negatively impacting the production, growth or other desired metabolic characteristics of the bacterial microorganism (i.e., Bacillus subtilis).

[0106] Other embodiments of the present disclosure can include integrating a polynucleotide into the bacterial microorganism (i.e., Bacillus subtilis) genome at a neutral site, and the subsequent stacking of a second polynucleotide at the same location. Wherein, the neutral site within the bacterial microorganism (i.e., Bacillus subtilis) is utilized as a preferred locus for introducing additional polynucleotides. In an embodiment the amyE genomic locus serves as a neutral integration site for the integration of a polynucleotide into the bacterial microorganism (i.e., Bacillus subtilis) genome.

[0107] Other embodiments of the present disclosure can include integrating a polynucleotide containing a gene expression cassette into the bacterial microorganism (i.e., Bacillus subtilis) genome at a neutral site, and the subsequent removal of a selectable marker expression cassette from the integrated polynucleotide. Wherein, the method used to remove the selectable marker expression cassette is a double crossing over method, an excision method using CRE-LOX, an excision method using FLP-FRT, or an excision method using the RED/ET RECOMBINATION® kit (Genebridges, Heidelberg, Germany), in addition to other excision methods known in the art.

[0108] Other embodiments of the present disclosure can include integrating a polynucleotide into bacterial microorganism (i.e., Bacillus subtilis) genome at a neutral site as an alternative to the use of extraneous replicating plasmids. Wherein, one or more extraneous replicating plasmids are incompatible due to the presence of similar origins or replication, incompatibility groups, redundant selectable marker, or other gene elements. Wherein, one or more extraneous replicating plasmids are not functional in bacterial microorganism (i.e., Bacillus subtilis) due to the specificity of the bacterial microorganism (i.e., Bacillus subtilis) restriction modification system. Wherein, one or more extraneous replicating plasmids are not available, functional or readily transformable within bacterial microorganism (i.e., Bacillus subtilis).

[0109] Other embodiments of the present disclosure can include methods for increasing the efficiency of homologous recombination in a prokaryotic cell. Methods relying upon homologous recombination mediated by introduced enzymes, such as lambda red ‘recombineering’ and analogous approaches are useful in a limited number of bacterial classes, particularly Escherichia (Datsenko and Wanner (2000) Proc Natl Acad Sci USA. 97: 6640-5), Salmonella, and Bacillus. Methods relying upon site-specific recombination mediated by introduced enzymes, such as phage integrases, FLP/FRT or Cre/loxP may also be used, but are reliant on the presence of pre-existing sites within the target DNA (Wirth et al (2007) Current Opinions in Biotechnology 18, 411-419). Alternative methods exploit viruses or mobile elements, or their components (e.g. phage, transposons or mobile introns).

[0110] However, methods relying upon host-mediated homologous recombination are by far the most commonly-used type of chromosomal DNA modifications. In a typical microbial application of host-mediated homologous recombination, a plasmid with a single region of sequence identity with the chromosome is integrated into the chromosome by single-crossover integration, sometimes referred to as ‘Campbell-like integration’. After such an event, genes on the introduced plasmid are replicated as part of the chromosome, which may be more rapid than the plasmid replication. Accordingly, growth in medium with selection for a plasmid-borne selectable marker gene may provide a selective pressure for integration. Campbell-like integration can be used to inactivate a chromosomal gene by placing an internal fragment of a gene of interest on the plasmid, so that after integration, the chromosome will not contain a full-length copy of the gene. The chromosome of a Campbell-like integrant cell is not stable, because the integrated plasmid is flanked by the homologous sequences that directed the integration. A further homologous recombination event between these sequences leads to excision of the plasmid, and reversion of the chromosome to wild-type. For this reason, it may be necessary to maintain selection for the plasmid-borne selectable marker gene to maintain the integrant clone.

[0111] An improvement on the basic single-crossover integration method of chromosomal modification is double crossover homologous recombination, also referred to as allelic exchange, which involves two recombination events. The desired modified allele is placed on a plasmid flanked by regions of homology to the regions flanking the target allele in the chromosome (‘homology arms’). A first integration event can occur in either pair of homology arms, leading to integration of the plasmid into the chromosome in the same manner as Campbell-like integration. After the first crossover event, the chromosome contains two alternative sets of homologous sequences that can direct a second recombination event. If the same sequences that directed the first event recombine, the plasmid will be excised, and the cell will revert to wild-type. If the second recombination event is directed by the other homology arm, a plasmid will be excised, but the original chromosomal allele will have been exchanged for the modified allele introduced on the plasmid; the desired chromosomal modification will have been achieved. As with Campbell-like integration, the first recombination event is typically detected and integrants isolated using selective advantage conferred by integration of a plasmid-borne selectable marker gene.

[0112] As used herein, the term “fermentation” includes both embodiments in which literal fermentation is employed and embodiments in which other, non-fermentative culture modes are employed. Fermentation may be performed at any scale. In one embodiment, the fermentation medium may be selected from among rich media, minimal media, a mineral salts media; a rich medium may be used, but is preferably avoided. In another embodiment either a minimal medium or a mineral salts medium is selected. In still another embodiment, a minimal medium is selected. In yet another embodiment, a mineral salts medium is selected. Mineral salts media are particularly preferred. All such media can be utilized for the expression of N-acylglycine surfactants and are considered as a suitable expression medium for microorganism fermentation.

[0113] The fermentation system according to the present disclosure can be cultured in any fermentation format. For example, batch, fed-batch, semi-continuous, and continuous fermentation modes may be employed herein.

[0114] The fermentation systems according to the present disclosure are useful for transgene expression at any scale (i.e. volume) of fermentation. Thus, e.g., microliter-scale, centiliter scale, and deciliter scale fermentation volumes may be used. In addition, larger scale fermentations including fermentations greater than 1 Liter scale can be used. In one embodiment, the fermentation volume will be at or above 1 Liter. In another embodiment, the fermentation volume will be at or above 5 Liters, 10 Liters, 15 Liters, 20 Liters, 25 Liters, 50 Liters, 75 Liters, 100 Liters, 200 Liters, 50 Liters, 1,000 Liters, 2,000 Liters, 5,000 Liters, 10,000 Liters, 50,000 Liters or 100,000 Liters.

[0115] In the present disclosure, growth, culturing, and/or fermentation of the transformed host cells is performed within a temperature range permitting survival of the host cells, preferably a temperature within the range of about 4° C. to about 55° C., inclusive.

[0116] The ability for a microorganism to produce N-acylglycine surfactants according to this disclosure may be further assayed by isolating and purifying chimeric nonribosomal peptide synthetase proteins to substantial purity by standard techniques well known in the art, including, but not limited to, ammonium sulfate or ethanol precipitation, acid extraction, anion or cation exchange chromatography, phosphocellulose chromatography, hydrophobic interaction chromatography, affinity chromatography, nickel chromatography, hydroxylapatite chromatography, reverse phase chromatography, lectin chromatography, preparative electrophoresis, detergent solubilization, column chromatography, immunopurification methods, and others. For example, N-acylglycine surfactants having established molecular adhesion properties can be reversibly fused to a ligand. With the appropriate ligand, the N-acylglycine surfactants can be selectively adsorbed to a purification column and then freed from the column in a relatively pure form. The fused N-acylglycine surfactants is then removed by enzymatic activity. In addition, protein can be purified using immunoaffinity columns or Ni-NTA columns. General techniques are further described in, for example, R. Scopes, Protein Purification: Principles and Practice, Springer-Verlag: N.Y. (1982); Deutscher, Guide to Protein Purification, Academic Press (1990); U.S. Pat. No. 4,511,503; S. Roe, Protein Purification Techniques: A Practical Approach (Practical Approach Series), Oxford Press (2001); D. Bollag, et al., Protein Methods, Wiley-Lisa, Inc. (1996); A K Patra et al., Protein Expr Purif, 18(2): p/ 182-92 (2000); and R. Mukhija, et al., Gene 165(2): p. 303-6 (1995). See also, for example, Ausubel, et al. (1987 and periodic supplements); Deutscher (1990) “Guide to Protein Purification,” Methods in Enzymology vol. 182, and other volumes in this series; Coligan, et al. (1996 and periodic Supplements) Current Protocols in Protein Science Wiley/Greene, NY; and manufacturer's literature on use of protein purification products, e.g., Pharmacia, Piscataway, N.J., or Bio-Rad, Richmond, Calif. Combination with recombinant techniques allow fusion to appropriate segments, e.g., to a FLAG sequence or an equivalent which can be fused via a protease-removable sequence. See also, for example, Hochuli (1989) Chemische Industrie 12:69-70; Hochuli (1990) “Purification of Recombinant Proteins with Metal Chelate Absorbent” in Setlow (ed.) Genetic Engineering, Principle and Methods 12:87-98, Plenum Press, NY; and Crowe, et al. (1992) QIAexpress: The High Level Expression & Protein Purification System QIAGEN, Inc., Chatsworth, Calif.

[0117] The recombinantly produced and expressed N-acylglycine surfactants can be recovered and purified from the recombinant cell cultures by numerous methods, for example, high performance liquid chromatography (HPLC) can be employed for final purification steps, as necessary.

[0118] The molecular weight of a N-acylglycine surfactant can be used to isolate it from cellular debris of greater or lesser size using ultrafiltration through membranes of different pore size (for example, Amicon or Millipore membranes). As a first step, the N-acylglycine surfactant mixture can be ultrafiltered through a membrane with a pore size that has a lower molecular weight cut-off than the molecular weight of the N-acylglycine surfactant. The retentate of the ultrafiltration can then be ultrafiltered against a membrane with a molecular cut off greater than the molecular weight of the N-acylglycine surfactant. The N-acylglycine surfactants will pass through the membrane into the filtrate.

[0119] N-acylglycine surfactants can also be separated from other cellular debris on the basis of its size, net surface charge, hydrophobicity, and affinity for ligands. In addition, the N-acylglycine surfactants can be conjugated to column matrices for isolation. All of these methods are well known in the art. It will be apparent to one of skill that chromatographic techniques can be performed at any scale and using equipment from many different manufacturers (e.g., Pharmacia Biotech).

[0120] Upon isolation and purification of N-acylglycine surfactants, the molecules can be used for, but not limited to, personal care.

[0121] In the present disclosure, “personal care” is intended to refer to cosmetic and skin care compositions for application to the skin, including, for example, body washes and cleansers, as well as leave on application to the skin, such as lotions, creams, gels, gel creams, serums, toners, wipes, liquid foundations, make-ups, tinted moisturizer, oils, face/body sprays, topical medicines, and sunscreens.

[0122] In the present disclosure, “personal care” is also intended to refer to hair care compositions including, for example, shampoos, leave-on conditioners, styling gels, hairsprays, and mousses. Preferably, the hair care compositions are cosmetically acceptable.

[0123] “Personal care” relates to compositions to be topically administered (i.e., not ingested). Preferably, the personal care composition is cosmetically acceptable. “Cosmetically acceptable” refers to ingredients typically used in personal care compositions, and is intended to underscore that materials that are toxic when present in the amounts typically found in personal care compositions are not contemplated as part of the present disclosure. The compositions of the disclosure may be manufactured by processes well known in the art, for example, by means of conventional mixing, dissolving, granulating, emulsifying, encapsulating, entrapping or lyophilizing processes.

[0124] Embodiments of the subject disclosure are further exemplified in the following Examples. It should be understood that these Examples are given by way of illustration only. From the above embodiments and the following Examples, one skilled in the art can ascertain the essential characteristics of this disclosure, and without departing from the spirit and scope thereof, can make various changes and modifications of the embodiments of the disclosure to adapt it to various usages and conditions. Thus, various modifications of the embodiments of the disclosure, in addition to those shown and described herein, will be apparent to those skilled in the art from the foregoing description. Such modifications are also intended to fall within the scope of the appended claims. The following is provided by way of illustration and not intended to limit the scope of the invention.

### EXAMPLES

### Example 1

### Identification and Characterization of Glycine-Specific Adenylation Domains

[0125] Amino acid specific adenylation domains (“A” domains) were identified from microbial genomic DNA submissions provided in Genbank (Benson, D., Karsch-Mizrachi, I., Lipman, D. J., Ostell, J., and Wheeler, D. L. (2005). GenBank. Nucleic Acids Res. 33, D34-D38.doi:10.1093/nar/gki063). The A domains enzymatically recognize specific amino acid building blocks and recruit the amino acid to a peptidyl or amino-acyl chain. Each A domain specifically recognizes and binds a particular amino acid. Analysis of the isolated A domains was completed to determine the M1 and M5 “A” domains that were glycine-specific A domains. Table 1 lists the glycine specific M1 and M5 “A” domains that were identified from the analysis and search of Genbank.

TABLE 1
Glycine-specific adenylation domains from Bacillus subtilis, Bacillus amyloliquefaciens
and Streptomyces roseosporus. Amino acids lining the substrate binding pocket of the
adenylation domain which confer specificity (corresponding to amino acid residues at positions
235, 236, 239, 278, 299, 301, 322, 330, 331, and 517 of the substrate-binding pocket of the
gramicidin S synthetase (GrsA) phenylalanine activating domain; Challis GL, Ravel J, Townsend
CA. Predictive, structure-based model of amino acid recognition by nonribosomal peptide
synthetase adenylation domains. Chem Biol. 2000 Mar; 7(3): 211-24, and Stachelhaus T,
Mootz HD, Marahiel MA. The specificity-conferring code of adenylation domains in nonribosomal
peptide synthetases. Chem Biol. 1999 Aug; 6(8): 493-505) are listed below.

| | | | | | Conserved Binding Site Residue | | | | | | | | | | |
|---|---|---|---|---|---|---|---|---|---|---|---|---|---|---|---|
| | | | | | | Amino acid residue location | | | | | | | | | |
| | | | Amino Acid | | | as compared to GrsA | | | | | | | | | |
| Organism | Strain | Gene | Specificity | Domain | SEQ ID NO: | 235 | 236 | 239 | 278 | 299 | 301 | 322 | 330 | 331 | 517 |
| B. subtilis | Strain | dhbF | glycine | M1 | SEQ ID NO: 41 | D | I | L | Q | L | G | L | I | W | K |
| | 168 | | | | | | | | | | | | | | |
| B. | FZB42 | baeJ | glycine | M1 | SEQ ID NO: 40 | D | I | L | Q | L | G | M | I | W | K |
| amyloliquefaciens. | | | | | | | | | | | | | | | |
| B. subtilis | Strain | pksJ | glycine | M1 | SEQ ID NO: 40 | D | I | L | Q | L | G | M | I | W | K |
| | 168 | (BSU17180) | | | | | | | | | | | | | |
| S. roseosporous | NRRL | dptA | glycine | M5 | SEQ ID NO: 42 | D | I | L | Q | L | G | V | I | W | K |
| | 11379 | | | | | | | | | | | | | | |
| S. roseosporous | NRRL | dptBC | glycine | M5 | SEQ ID NO: 89 | D | I | L | Q | V | G | M | I | W | K |
| | 11379 | | | | | | | | | | | | | | |

| | | | | | | | | | | | |
|---|---|---|---|---|---|---|---|---|---|---|---|
| Results in a Conserved Sequence of SEQ ID NO: 1 | SEQ ID NO: 1 | D | I | L | Q | (L/ | G | (L/M/ | I | W | K |
| | | | | | | V) | | V) | | | |

### Example 2

### Identification and Annotation of the B. subtilis Surfactin Biosynthesis Gene Cluster

[0126] Next, the sequences of seven different B. subtilis surfactin (also described as surfactant) biosynthesis gene cluster domains were obtained and sequenced from Genbank. The individual domains of the B. subtilis surfactant biosynthesis gene cluster (C: condensation domain, A: adenylation domain, P: peptidyl carrier protein domain, and TE: thioesterase domain) for each seven B. subtilis surfactin biosynthesis gene cluster domains were identified by screening the protein sequences using the PSK/NRPS prediction tool (Brian O. Bachmann and Jacques Ravel (2009) In silico Prediction of Microbial Secondary Metabolic Pathways from DNA Sequence Data. Methods in Enzymology. 458:181-217). In addition, the dhbF and pksJ glycine-specific adenylation domains, which were identified above, were further analyzed using the PSK/NRPS prediction tool. The PSK/NRPS prediction tool identified the various domains for each of the corresponding sequences that are presented in Table 2.

TABLE 2
The seven Bacillus subtilis surfactin biosynthesis gene cluster domains and the
encoding polynucleotide sequence. The individual sub-domains that make up
each domain are abbreviated as follows; C: condensation domain A: adenylation
domain, P: peptidyl carrier protein domain, and TE: thioesterase domain.

| | | | Individual Sub- | | |
|---|---|---|---|---|---|
| | | | domains within | | |
| | Accession | Domain | the Biosurfactant | A-Domain | |
| Organism | Number | Name | Domains | Specificity | SEQ ID NO: |
| B. subtilis | NC_000964.3 | SrfAA - | C-A-P | Glutamate | SEQ ID NO: 2 |
| | | M1 | | | |
| B. subtilis | NC_000964.3 | SrfAA - | C-A-P | Leucine | SEQ ID NO: 3 |
| | | M2 | | | |
| B. subtilis | NC_000964.3 | SrfAA - | C-A-P-E | D-Leucine | SEQ ID NO: 4 |
| | | M3 | | | |
| B. subtilis | NC_000964.3 | SrfAB - | C-A-P | Valine | SEQ ID NO: 5 |
| | | M4 | | | |
| B. subtilis | NC_000964.3 | SrfAB - | C-A-P | Aspartate | SEQ ID NO: 6 |
| | | M5 | | | |
| B. subtilis | NC_000964.3 | SrfAB - | C-A-P-E | D-Leucine | SEQ ID NO: 7 |
| | | M6 | | | |
| B. subtilis | NC_000964.3 | SrfAC - | C-A-P-TE | Leucine | SEQ ID NO: 8 |
| | | M7 | | | |

### Example 3

### Organization and Arrangement of Chimeric NRPS Coding Sequences

[0127] After the glycine-specific adenylation domains and the various domains of the surfactin biosynthesis gene cluster were identified, they were incorporated as a chimeric, fusion gene to produce a novel, chimeric coding sequence. Accordingly, the functional condensation (C) domain, the identified glycine-specific adenylation (A) domain, the peptidyl carrier protein (P) domain, and the thioesterase (TE) domain were designed as a chimeric, single contiguous open reading frame (i.e., C-A-P-TE). In the initial design, the C, P and TE domain coding sequences were obtained from the SrfAA (SEQ ID N0:43), SrfAB (SEQ ID N0:44), and SrfAC (SEQ ID N0:45) modules of the native surfactin biosynthetic cluster of B. subtilis str. OKB120. An alignment of the protein sequences (FIG. 10) from the coding sequences of the A domains recognizing glycine were identified from the following genes: dhbF (B. subtilis; NC_000964.3; gi|254763440|sp|P45745.4|; A domain of SEQ ID N0:9 from protein SEQ ID N0:10); pksJ (B. subtilis 168; NC_000964.3; gi|255767396|ref|NP_389598.3|; A domain of protein SEQ ID NO:11 from protein SEQ ID N0:12); baeJ (B. amyloliquefaciens, gi|154686131|ref|YP_001421292.1|; A domain of SEQ ID N0:90 from protein SEQ ID N0:91); dptA (S. roseosporous; gi|60650932|gb|AAX31557.1|; A domain of SEQ ID N0:92 from protein SEQ ID N0:93); and, dptBC (S. roseosporous; gi|60650933|gb|AAX31558.1|; A domain of SEQ ID N0:94 from protein SEQ ID NO:95). FIG. 1 provides a schematic of the organization and arrangement of the NRPS fusion gene subdomains in relation to the srfAD gene. The resulting novel, chimeric NRFS open reading frame was designed to contain the srfAD gene located downstream. The srfAD gene encodes an external type II thioesterase enzyme and has been previously shown to stimulate the formation of the surfactant biosynthesis in B. subtilis.

### Example 4

### Construction of Chimeric NRPS Coding Sequences

[0128] The C, A, and P domain sequences from the biosurfactant genes were identified using the PSK/NRPS prediction tool as described above, and were aligned by the sequence alignment tool, CLUSTALW™. The conserved residues within the different C, A, and P domains as well as at the junctions between domains were identified (FIG. 2). A conserved glutamic-acid (E) residue at the C and A junction was identified and was used to fuse the upstream C domain to the downstream glycine-specific A domain (FIG. 2A; highlighted and labeled with an asterisk). Likewise, a conserved leucine (L) or a conserved aspartic acid (D) residue within the P domain were used to fuse the upstream glycine-specific A domain to the downstream P domain (FIG. 2B; highlighted and labeled with an asterisk).

[0129] The following three fusion constructs were synthesized using the organization and strategy as previously described in Example 2 (FIG. 3):
[0130] (1) BSU3a (SEQ ID NO:13): The glycine-specific A domain sequence originated from pksJ (BSU17180); this A domain (SEQ ID NO:49) was fused downstream of the native surfactin cluster, SrfAA-M1 C domain (SEQ ID NO:50) at the conserved glutamic acid (E) residue within the C and A module junction (FIG. 3A). Next, the A domain of pksJ (BSU17180) was fused to the P domain of SrfAC-M7, such that the P domain was located downstream of the A domain (FIG. 3A). The remaining PCP and TE domain sequences (SEQ ID NO:51) originated from the SrfAC-M1 domain of the native surfactin cluster. The resulting fusion gene construct was cloned downstream of the PsrfA promoter and a ribosome binding stream, and upstream of a native SrfAD coding sequence and bacterial terminator sequence (SEQ ID NO:46). The resulting construct was labeled as ME-B007 (Acyl BSU3a) and is shown as FIG. 4.
[0131] (2) BSU4a (SEQ ID NO:14): The glycine-specific A domain originated from pksJ (BSU17180); this A domain (SEQ ID NO:49) was fused downstream of the native surfactin cluster, SrfAA-M1 C domain (SEQ ID NO:50) at the conserved glutamic acid (E) residue within the C and A module junction (FIG. 3B). Next, the A domain of the pksJ (BSU17180) was fused to the chimeric P domain, such that the chimeric P domain was located downstream of the A domain. The chimeric P domain contained the amino acid sequence NVEKAGIFD (SEQ ID NO: 96) from SrfAA-M1 P domain fused to the remaining amino acid sequence of the SrfAC-M7 P domain. The two P domains were joined at a conserved aspartic acid (D) residue (FIG. 3B). The remaining PCP and TE domain sequences (SEQ ID NO:51) originated from the SrfAC-M1 domain of the native surfactin cluster. The resulting fusion gene construct was cloned downstream of the PsrfA promoter and a ribosome binding stream, and upstream of a native SrfAD coding sequence and bacterial terminator sequence (SEQ ID NO:47). The resulting construct was labeled as ME-B008 (Acyl BSU4a) and is shown as FIG. 5.
[0132] (3) (SEQ ID NO:15): The glycine-specific A domain originated from the dhbF gene sequence; this A domain (SEQ ID NO:52) was fused downstream of the native surfactin cluster, SrfAA-M1 C domain (SEQ ID NO:50) at the conserved glutamic acid (E) residue within the C and A module junction (FIG. 3C). Next, the A domain of dhbF was fused to the P domain of SrfAC-M7 at a conserved aspartic acid (D) residue, such that the P domain was located downstream of the A domain (FIG. 3C). The remaining P and TE domain sequences (SEQ ID NO:51) came from the SrfAC-M1 domain of the native surfactin gene cluster. The resulting fusion gene construct was cloned downstream of the PsrfA promoter and a ribosome binding stream, and upstream of a native SrfAD coding sequence and bacterial terminator sequence (SEQ ID NO:48). The resulting construct was labeled as ME-B004 (Acyl Dhbf3a) and is shown as FIG. 6.

[0133] In addition to the three different fusion gene expression cassettes described above, another 16 chimeric fusion NRPS coding sequences were designed and constructed to assess the effect of different fusion points (i.e., between the C and A domains or the A and P domains) on biosynthesis of the N-acylglycine surfactants as shown in Table 3.

TABLE 3
Chimeric fusion NRPS coding sequences.

| Construct | A domain | | SEQ ID | | |
|---|---|---|---|---|---|
| Name | source | Description | NO: | Promoter | Vector |
| ME-B0014 | dhbf | -------L------L2-------------------- | SEQ ID | PsrfA | pDG1662 |
| | | D--------- | NO: 16 | | |
| ME-B0015 | dhbf | -------L-----------------L1--------- | SEQ ID | PsrfA | pDG1662 |
| | | D--------- | NO: 17 | | |
| ME-B0016 | dhbf | -------L------------E---------------- | SEQ ID | PsrfA | pDG1662 |
| | | D-------- | NO: 18 | | |
| ME-B0017 | dhbf | -------L----------P------------------ | SEQ ID | PsrfA | pDG1662 |
| | | D-------- | NO: 19 | | |
| ME-B0018 | dhbf | -------L----------------------------- | SEQ ID | PsrfA | pDG1662 |
| | | D-------- | NO: 20 | | |
| ME-B0019 | dhbf | ----------E---------------L1-------- | SEQ ID | PsrfA | pDG1662 |
| | | D-------- | NO: 21 | | |
| ME-B0020 | dhbf | ----------E----------E--------------- | SEQ ID | PsrfA | pDG1662 |
| | | D-------- | NO: 22 | | |
| ME-B0021 | dhbf | ----------E-------P------------------ | SEQ ID | PsrfA | pDG1662 |
| | | D-------- | NO: 23 | | |
| ME-B0022 | dhbf | ----------E----L2-------------------- | SEQ ID | PsrfA | pDG1662 |
| | | D--------- | NO: 24 | | |
| ME-B0023 | dhbf | -------L-----------------------G----- | SEQ ID | PsrfA | pDG1662 |
| | | D--------- | NO: 25 | | |
| ME-B0024 | dhbf | ----------E--------------------G----- | SEQ ID | PsrfA | pDG1662 |
| | | D--------- | NO: 26 | | |
| ME-B0025 | pksJ | -------L--------------------L1------- | SEQ ID | PsrfA | pDG1662 |
| | | D--------- | NO: 27 | | |
| ME-B0026 | pksj | -------L------------------W------------ | SEQ ID | PsrfA | pDG1662 |
| | | D--------- | NO: 28 | | |
| ME-B0027 | pksj | -------L---------V------------------- | SEQ ID | PsrfA | pDG1662 |
| | | D--------- | NO: 29 | | |
| ME-B0028 | pksJ | ----------E-----------W------------ | SEQ ID | PsrfA | pDG1662 |
| | | D--------- | NO: 30 | | |
| ME-B0029 | pksJ | ----------E------V------------------- | SEQ ID | PsrfA | pDG1662 |
| | | D--------- | NO: 31 | | |

### Example 5

### Assembly of NRPS Fusion Construct

[0134] The above described fusion constructs were synthesized and assembled under the expression of the constitutive promoter, PsrfA (SEQ ID NO:32) and flanked by the srdAD coding sequence (SEQ ID NO:33). In addition, the constructs contained native B. subtilis genomic DNA flanking sequences on both ends of the construct. The 5′ end of the gene expression cassette contained the 5′ amyE gene sequence from B. subtilis, and the 3′ end of the gene expression cassette contained the 3′ amyE gene sequence from B. subtilis. The flanking genomic DNA fragments were identical to genomic DNA sequences of the α-amylase gene (amyE) from B. subtilis, and were incorporated into the constructs for integration within the genomic locus. The fusion constructs and flanking genomic DNA were cloned into the pDG1662 plasmid (Bacillus Genetic Stock Center; Biological Sciences 556, 484 W. 12th Ave, Columbus, Ohio 43210-1214). FIG. 7 provides a schematic of the resulting plasmid, and a high level overview of the strategy for introducing the NRPSS gene fusion sequences into the amyE locus of B. subtilis str. OKB120.

### Example 6

### Transformation NRPS Fusion Construct in B. subtilis

[0135] The genetic make-up of Bacillus subtilis str. OKB120 is described in detail in Dirk Vollenbroich, Neena Mehta, Peter Zuber, Joachim Vater, and Roza Maria Kamp′(1994). Analysis of Surfactin Synthetase Subunits in srfA Mutants of Bacillus subtilis OKB105. Journal of Bacteriology, Vol. 176, No. 2; p. 395-400. This strain was generated by introducing a transposon mutation in the second module of the surfactin cluster (srfAB) of a surfactant producing strain labeled as OKB105. The resulting mutations to the gDNA of the strain are labeled as B. subtilis str. OKB120 (pheA1 sfp srfA::Tn917). The presence of this transposon insertion mutation renders the strain OKB120 incapable of producing the native surfactant product. However, the strain is capable of producing tetrapeptide and shorter Srf fragments including acyl-glutamate. Accordingly, the strain was transformed with the above described plasmids using the protocol as described in Guerout-Fleury, A. M., Frandsen, N. and Stragier, P. (1996) Plasmids for ectopic integration in Bacillus subtilis. Gene 180 (1-2), 57-61.

### Example 7

### Molecular Confirmation of Genomic DNA Integration of the NRPS Fusion Construct within the B. subtilis Genome

[0136] After the separate transformation of each gene construct into the B. subtilis chromosome, molecular confirmation assays were completed to confirm the integration of the NRPS fusion gene sequence into the α-amylase gene (amyE) locus of the genome by homologous recombination. Integration of the NRPS fusion gene construct within the amyE genomic locus resulted in the subsequent disruption of the amyE gene function. Accordingly, colony PCR was employed to detect the successful delivery of the NRPS construct within the bacterial chromosome. Table 4 lists the PCR primers used for colony PCR validation to confirm the presence of NRPS fusion construct and the corresponding gene sequences within the genome of B. subtilis. In addition, the disruption of the amyE locus, was validated by assaying amylase production on starch containing plates (Guerout-Fleury, A. M., Frandsen, N. and Stragier, P. (1996) Plasmids for ectopic integration in Bacillus subtilis, Gene 180 (1-2), 57-61). Furthermore, transformants were screened for the loss of spectinomycin resistance, which indicates that a double crossover event had occurred. B. subtilis str. OKB120 strains containing the NRPS fusion genes were obtained for each of the above described constructs and were fermented to produce N-acylglycine.

TABLE 4
The gene sequence information for NRPS
fusion constructs in this study and the PCR
validation primers used in this sturdy.

| Strain/ | |
|---|---|
| Construct | PCR Validation Primers |
| Dhbf3a | (SEQ ID NO: 34) F-CACGAGCATTTCAAATCTTG |
| | (SEQ ID NO: 35) R-CTGAACAATACGGCCTTG |
| BSU3a | (SEQ ID NO: 36) F-CACGAGCATTTCAAATCTTG |
| | (SEQ ID NO: 37) R-CTGAACAATACGGCCTTG |
| BSU4a | (SEQ ID NO: 38) F-CACGAGCATTTCAAATCTTG |
| | (SEQ ID NO: 39) R-CTGAACAATACGGCCTTG |

### Example 8

### Fermentation of N-Acylglycine

[0137] Identified bacterial colonies that contained the genomic integrant of the NRPS fusion gene sequence were isolated and cultured in a defined minimal medium (Media C Recipes for Surfactin production in Bacillus subtilis. Bacterial production of antimicrobial biosurfactants by Bacillus subtilis, Keenan Bence Thesis presented in partial fulfillment of the requirements for the Degree of Master of Science in engineering (chemical engineering) in the Faculty of Engineering at Stellenbosch University, Supervisor Prof. K. G. Clarke December 2011). The fermentation was completed at 37° C. at a volume of 30 ml. The fermentation medium was centrifuged and the cell extracts were prepared at 20, 48 and 72 hours using a 3:1 ratio of methanol to whole broth. The cell extracts were concentrated 2.5× in a Speedvac™ and dissolved in methanol for analysis of the presence of the novel product N-acylglycine by LC/MS.

### Example 9

### Quantitation and Structure Validation of N-Acylglycine Products

[0138] Metabolites in extracts prepared as described above were analyzed by two methods. Selected metabolites were quantified by separation using UHPLC followed by quantitation using selected ion monitoring (SIM)-mass spectrometry (MS). Identities of metabolites were validated by separation using UHPLC followed by high resolution MS and MS/MS, as described below. The LC-SIM-MS analysis system comprised the following components: G4220A Infinity 1290 binary pump, G4226A Infinity 1290 autosampler, G4212A Infinity 1290 diode array detector with 10 mm path length flow cell (G4212-60008), G1316C thermostated column compartment (TCC) and G6140A single quadrupole mass spectrometer running under Agilent ChemStation (version B.04.02 SP1 [212]). The system was mass calibrated each day of use using the Agilent CheckTune and/or Autotune routines. Operating parameters were as follows: temperature 350° C., nitrogen drying gas flow: 12 L/min; nebulization pressure: 35 psi; capillary voltage: 3000V, fragmentor voltage: 70V. The LC-accurate MS/MS (QTOF-MS) analysis system comprised the following components: Agilent G4220A Infinity 1290 binary pump, HTC-XT Leap-PAL autosampler, G4212A Infinity 1290 diode array detector with 60 mm path length flow cell (G4212-60007), G1316C column compartment at room temperature (approx. 25° C.) and AB Sciex 5600 quadrupole/time of flight (QTOF-MS) mass spectrometer running under Analyst TF software V 1.6, with data interrogation using Peakview V 1.2. The mass spectrometer was calibrated using a commercial APCI negative calibration solution for the AB Sciex system in the negative ionization mode. Mass measurements on eluted metabolites were made using the QTOF-MS instrument for mass spectra, measured to +/−0.001 Da accuracy, for example m/z 300.001+/−0.001 Da. Operating parameters were as follows: full-scan range 100-1000 Da, MS/MS scan range: 100-1000 Da; accumulation time: full-scan 0.15 sec; MS/MS: 0.10 sec; temperature 450-500° C.; ionspray floating voltage: 4500-5500; declustering potential: 80-100; scan event 1: TOF MS full scan collision energy 5-10 eV; scan events 2-4: product ion IDA collision energy 20-35 eV with a spread of 15 eV. MS/MS spectra were acquired using the following targeted inclusion list, corresponding to [M-H]⁻ for each targeted compound: m/z 300.2, 314.2, 356.2, 372.2 and 386.2. For both methods, metabolites in extracts were separated using an Agilent Eclipse Plus C18 (100×3.0 mm; 1.8 μm particle size) column eluted at 0.425 mL/min with a gradient of water-formic acid (99.9:0.1 v/v; “A”) and acetonitrile-formic acid (99.9:0.1 v/v; “B”). The gradient was as follows: 0-1.33 min: A:B=50:50; 1.33-13.33 min linear gradient to A:B=0:100; 13.33-14.67 min hold at A:B=0:100; 14.67-16.00 min linear gradient to A:B=50:50 and hold to 17.33 min.

[0139] The novel products (1) and (2), shown in FIG. 8, were detected by acquiring a selected ion chromatogram at m/z 314.2, and quantitation was performed with a multi-level calibration curve in external standard mode using authentic 3-OH—C14-GLY (3) (range: 0.001 to 10.136 μg/mL; Matreya LLC Lipids and Biochemicals, Pleasant Gap; PA 16823), which was detected by acquiring a selected ion chromatogram at m/z 300.2. Example chromatograms from the application of this method to extracts of the engineered strains, are shown in FIG. 9A (strain OKB120dhfb3), 9B (OKB120-BSU3a) and 9C (OKB120-BSU4a), which demonstrate successful production of these novel compounds in each of the three constructs. Two chromatographic peaks with the same accurate mass and MS fragments (see below) were observed in the B. subtilis strains during the SIM-MS assay. These peaks were concluded to be isomers of 3-OH—C15-GLY, most likely methyl group positional isomers in the fatty acid chain. In comparison, these two product peaks were not detected in the control (non-engineered) B. subtilis str. OKB120 strains. These data gave a quantitative estimate for combined production levels of 1+2 in the range 96-116 μg/L broth.

[0140] A summary of the UHPLC and mass spectral data supporting the structures of the compounds in FIG. 8 produced by strains OKB120-dhbf3a-2 and BSU-3a appears in Table 5. While no authentic standards of the methyl-group isomers 3-OH—C15-GLY (1) or (2) were available for comparison, detection of two compounds having the anticipated EM-Hf ion at m/z 314.234, which eluted closely following an authentic standard of 3-OH—C14-GLY (3), supports the production of the target molecule since an additional methyl group would increase the lipophilicity of the molecule relative to 3-OH—C14-GLY (3), thereby causing it to adsorb slightly more strongly to the UHPLC analysis stationary phase, and elute slightly later. The measured and theoretical weights for the parent ion and all major fragment ions showed good agreement, validating the proposed structures.

TABLE 5
Summary of UHPLC and mass spectral data supporting the structures of the compounds
in FIG. 8 produced by B. subtilis strains OKB120-dhbf3a-2 and BSU-3a.

| | | Retention | Retention | | Proposed | | Measured | Measured |
|---|---|---|---|---|---|---|---|---|
| | | (Mins; | (Mins; | | Molecular | Theoretical | Mass | Mass |
| Sample Type | Compound | Extract) | Standard) | Proposed Ion¹ | Formula | Mass | (Extract) | (Standard) |
| Authentic | 3-OH—C14-GLY (3) | | 5.46 | parent | C₁₆H₃₀NO₄⁻ | 300.218 | | 300.217 |
| Standard | | | | | | | | |
| | | | | M—H₂O | C₁₆H₂₈NO₃⁻ | 282.208 | | 282.207 |
| | | | | M—H₂O—CO₂ | C₁₅H₂₈NO⁻ | 238.218 | | 238.216 |
| | | | | M—C₁₂H₂₄O | C₄H₆NO₃⁻ | 116.035 | | 116.035 |
| OKB120 dhbf3a-2 | 3-OH—C15-GLY | 6.37 | | parent | C₁₇H₃₂NO₄⁻ | 314.234 | 314.237 | |
| extract | isomer 1 (1) | | | | | | | |
| | | | | M—H₂O | C₁₇H₃₀NO₃⁻ | 296.223 | 296.222 | |
| | | | | M—CO₂—H₂ | C₁₆H₃₀NO₂⁻ | 268.228 | 268.236 | |
| | | | | M—H₂O—CO₂ | C₁₆H₃₀NO⁻ | 252.233 | 252.230 | |
| | | | | M—C₁₃H₂₆O | C₄H₆NO₃⁻ | 116.035 | 116.036 | |
| | 3-OH—C15-GLY | 6.52 | | parent | C₁₇H₃₂NO₄⁻ | 314.234 | 314.234 | |
| | isomer 2 (2) | | | | | | | |
| | | | | M—H₂O | C₁₇H₃₀NO₃⁻ | 296.223 | 296.226 | |
| | | | | M—H₂O—CO₂ | C₁₆H₃₀NO⁻ | 252.233 | 252.239 | |
| | | | | M—CH₃CONHCH₂CO₂ | C₁₃H₂₅O⁻ | 197.191 | 197.188 | |
| | | | | H | | | | |
| | | | | M—C₁₃H₂₆O | C₄H₆NO₃⁻ | 116.035 | 116.035 | |
| BSU-3a² extract | 3-OH—C15-GLY | 6.34 | | parent | C₁₇H₃₂NO₄⁻ | 314.234 | 314.236 | |
| | isomer 1 (1) | | | | | | | |
| | | | | M—H₂O | C₁₇H₃₀NO₃⁻ | 296.223 | 296.221 | |
| | | | | M—H₂O—CO₂ | C₁₆H₃₀NO⁻ | 252.233 | 252.228 | |
| | | | | M—C₈H₁₅NO₃ | C₉H₁₇O⁻ | 141.129 | 141.132 | |
| | | | | M—C₁₂H₂₅—OH | C₅H₆NO₃⁻ | 128.035 | 128.041 | |
| | | | | M—C₁₃H₂₆O | C₄H₆NO₃⁻ | 116.035 | 116.037 | |
| | 3-OH—C15-GLY | 6.47 | | parent | C₁₇H₃₂NO₄⁻ | 314.234 | 314.235 | |
| | isomer 2 (2) | | | | | | | |
| | | | | M—H₂O | C₁₇H₃₀NO₃⁻ | 296.223 | 296.224 | |
| | | | | M—H₂O—CO₂ | C₁₆H₃₀NO⁻ | 252.233 | 252.241 | |
| | | | | M—H₂—H₂O—CO₂ | C₁₆H₂₈NO⁻ | 250.218 | 250.214 | |
| | | | | M—C₈H₁₅NO₃ | C₉H₁₇O⁻ | 141.129 | 141.125 | |
| | | | | M—C₁₃H₂₆O | C₄H₆NO₃⁻ | 116.035 | 116.035 | |

¹All parent ions represent [M—H]⁻
²Supplemented with exogenous glycine

[0141] In conclusion, LC/MS results demonstrate that B. subtilis str. OKB120 strains expressing the novel, chimeric NRPS fusion proteins can successfully recruit glycine into a medium chain-length 11-hydroxy fatty acid peptide chain, in vivo, resulting in the desired production of N-acylglycine.

### Example 10

### Analysis of Fatty Acid Branching Composition of N-Acylglycine Products

[0142] A methanolysis procedure based on the method of Yakimov et al. was used to analyze fatty acids from purified N-acylglycine surfactant products. Briefly, five milligrams of N-acylglycine surfactant product was hydrolyzed in argon purged tubes for 16 h at 90° C. with 20 ml of 25% 12 N HCl in methanol. The hydrolyzed fatty acid methyl esters (FAME) were then extracted with 35 ml of 1:1 (vol/vol) ethyl acetate:hexane. The organic phase was concentrated under a stream of ambient nitrogen to 2 ml. The organic concentrate was then neutralized with 2 ml of 0.4 M phosphate buffer (pH 12) and left to stand until a clear phase separation developed. The upper layer was then transferred into a 2 ml micro-volumetric flask and adjusted to mark as needed. A 0.4 ml aliquot was evaporated under a gentle stream of ambient nitrogen until the point of dryness and derivatized with 0.2 ml neat MSTFA [N-Methyl-N-(trimethylsilyl) trifluoroacetamide] for analysis by gas chromatography-mass spectrometry (Agilent 6890 GC and Agilent 5975C MSD). Next, 1 μl was used for injection and inlet temperature was set at 220° C. in splitless mode. The oven temperature was set at 60° C. for 1 minute, ramped at 4° C./minute to 120° C., 1.5° C./minute to 210° C. with a 4 minute hold, and then ramped at 20° C./minute to 230° C. with a 29 minute hold. The capillary column used was a Thermo Scientific TR-FAME 0.25 mm×120 m×0.25 μm. The carrier gas was helium and the flow rate was 1 ml/minute. The mass spectrometer ion source used methane gas chemical ionization to minimize fragmentation of trimethylsilyl (TMS) derivatized hydroxyl groups on respective FAMEs enhancing intact molecule quantitation and simplifying the spectrum. Retention times, mass spectra, and quantitation were established using authentic fatty acid standards (Matreya LLC, Pleasant Gap, USA) and bacterial reference FAME standards (Sigma-Aldrich, St. Louis, USA). Table 6 provides the results of the N-acylglycine surfactant products and describes the quantitated percentage of branching for each of the fatty acids

TABLE 6
B. subtilis surfactant fatty acid composition and the quantitated
percentage for each of the branched chain fatty acids.

| | Hydroxy fatty acid relative % | | |
|---|---|---|---|
| Carbon | branching composition | | |
| chain | linear | iso | anteiso |

| | | | |
|---|---|---|---|
| 10 | 0.0 | 0.0 | 0.0 |
| 11 | 0.0 | 0.0 | 0.0 |
| 12 | 1.8 | 0.0 | 0.0 |
| 13 | 1.5 | 8.6 | 5.5 |
| 14 | 11.9 | 30.7 | 0.0 |
| 15 | 0.0 | 19.0 | 18.1 |
| 16 | 0.0 | 2.9 | 0.0 |
| 17 | 0.0 | 0.0 | 0.0 |
| 18 | 0.0 | 0.0 | 0.0 |

[0143] While aspects of this invention have been described in certain embodiments, they can be further modified within the spirit and scope of this disclosure. This application is therefore intended to cover any variations, uses, or adaptations of embodiments of the invention using its general principles. Further, this application is intended to cover such departures from the present disclosure as come within known or customary practice in the art to which these embodiments pertain and which fall within the limits of the appended claims.

SEQUENCE LISTING

SEQ ID NO: 1

DILQ(L/V)G(L/M/V)IWK
>SrfAA-M1

SEQ ID NO: 2

MEITFYPLTDAQKRIWYTEKFYPHTSISNLAGIGKLVSADAIDYVLVEQAIQEFIRRNDAMR
LRLRLDENGEPVQYISEYRPVDIKHTDTTEDPNAIEFISQWSREETKKPLPLYDCDLFRFSLF
TIKENEVWFYANVHHVISDGISMNILGNAIMHIYLELASGSETKEGISHSFIDHVLSEQEYA
QSKRFEKDKAFWNKQFESVPELVSLKRNASAGGSLDAERFSKDVPEALHQQILSFCEANK
VSVLSVFQSLLAAYLYRVSGQNDVVTGTFMGNRTNAKEKQMLGMFVSTVPLRTNIDGGQ
AFSEFVKDRMKDLMKTLRHQKYPYNLLINDLRETKSSLTKLFTVSLEYQVMQWQKEEDL
AFLTEPIFSGSGLNDVSIHVKDRWDTGKLTIDFDYRTDLFSREEINMICERMITMLENALTH
PEHTIDELTLISDAEKEKLLARAGGKSVSYRKDMTIPELFQEKAELLSDHPAVVFEDRTLSY
RTLHEQSARIANVLKQKGVGPDSPVAVLIERSERMITAIMGILKAGGAYVPIDPGFPAERIQ
YILEDCGADFILTESKVAAPEADAELIDLDQAIEEGAEESLNADVNARNLAYIIYTSGTTGR
PKGVMIEHRQVHHLVESLQQTIYQSGSQTLRMALLAPFHFDASVKQIFASLLLGQTLYIVP
KKTVTNGAALTAYYRKNSIEATDGTPAHLQMLAAAGDFEGLKLKHMLIGGEGLSSVVAD
KLLKLFKEAGTAPRLTNVYGPTETCVDASVHPVIPENAVQSAYVPIGKALGNNRLYILDQ
KGRLQPEGVAGELYIAGDGVGRGYLHLPELTEEKFLQDPFVPGDRMYRTGDVVRWLPDG
TIEYLGREDDQVKVRGYRIELGEIEAVIQQAPDVAKAVVLARPDEQGNLEVCAYVVQKPG
SEFAPAGLREHAARQLPDYMVPAYFTEVTEIPLTPSGKVDRRKLFALEVKAVSGTAYTAP
RNETEKAIAAIWQDVLNVEKAGIFDNFFETGGHSLKAMTLLTKIHKETGIEIPLQFLFEHPTI
TALAE
>SrfAA-M2

SEQ ID NO: 3

IVSQFEDAGVGYNMPAAAILEGPLDIQKLERAFQGLIRRHESLRTSFVLENSTPRQKIHDSV
DFNIEMIERGGRSDEAIMASFVRTFDLAKAPLFRIGLLGLEENRHMLLFDMHHLISDGVSIG
IMLEELARIYKGEQLPDLRLQYKDYAVWQSRQAAEGYKKDQAYWKEVFAGELPVLQLL
SDYPRPPVQSFEGDRVSIKLDAGVKDRLNRLAEQNGATLYMVMLSAYYTLLSKYTGQDD
IIVGTPSAGRNHSDTEGIIGMFVNTLAIRSEVKQNETFTQLISRVRKRVLDAFSHQDYPFEW
LVEDLNIPRDVSRHPLFDTMFSLQNATEGIPAVGDLSLSVQETNFKIAKFDLTVQARETDE
GIEIDVDYSTKLFKQSTADRLLTHFARLLEDAAADPEKPISEYKLLSEEEAASQIQQFNPGR
TPYPKDKTIVQLFEEQAANTPDHTALQYEGESLTYRELNERANRLARGILSLGAGEGRTA
AVLCERSMDMIVSILAVLKSGSAYVPIDPEHPIQRMQHFFRDSGAKVLLTQRKLKALAEEA
EFKGVIVLADEEESYHADARNLALPLDSAAMANLTYTSGTTGTPKGNIVTHANILRTVKE
TNYLSITEQDTILGLSNYVFDAFMFDMFGSLLNGAKLVLIPKETVLDMARLSRVIERENISI
LMITTALFHLLVDLNPACLSTLRKIMFGGERASVEHVRKALQTVGKGKLLHMYGPSESTV
FATYHPVDELEEHTLSVPIGKPVSNTEVYILDRTGHVQPAGIAGELCVSGEGLVKGYYNRP
ELTEEKFVPHPFTSGERMYKTGDLARWLPNGDIEFIGRIDHQVKIRGQRIELGEIEHQLQTH
DRVQESVVLAVDQGAGDKLLCAYYVGEGDISSQEMREHAAKDLPAYMVPAVFIQMDEL
PLTGNGKIDRRALPIPDANVSRGVSYVAPRNGTEQKVADIWAQVLQAEQVGAYDHFFDIG
GHSLAGMKMLALVHQELGVELSLKDLFQSPTVEGLAQVI
>SrfAA-M3

SEQ ID NO: 4

VSSPQKRMYVLQQLEDAQTSYNMPAVLRLTGELDVERLNSVMQQLMQRHEALRTTFEIK
DGETVQRIWEEAECEIAYFEAPEEETERIVSEFIKPFKIDQLPLFRIGLIKHSDTEHVLLFDMH
HIISDGASVGVLIEELSKLYDGETLEPLRIQYKDYAVWQQQFIQSELYKKQEEHWLKELDG
ELPVLTLPTDYSRPAVQTFEGDRIAFSLEAGKADALRRLAKETDSTLYMVLLASYSAFLSK
ISGQDDIIVGSPVAGRSQADVSRVIGMFVNTLALRTYPKGEKTFADYLNEVKETALSAFDA
QDYPLEDLIGNVQVQRDTSRNPLFDAVFSMQNANIKDLTMKGIQLEPHPFERKTAKFDLT
LTADETDGGLTFVLEYNTALFKQETIERWKQYWMELLDAVTGNPNQPLSSLSLVTETEKQ
ALLEAWKGKALPVPTDKTVHQLFEETAQRHKDRPAVTYNGQSWTYGELNAKANRLARI
LMDCGISPDDRVGVLTKPSLEMSAAVLGVLKAGAAFVPIDPDYPDQRIEYILQDSGAKLLL
KQEGISVPDSYTGDVILLDGSRTILSLPLDENDEENPETAVTAENLAYMIYTSGTTGQPKGV
MVEHHALVNLCFWHHDAFSMTAEDRSAKYAGFGFDASIWEMFPTWTIGAELHVIEEAIR
LDrVRLNDYFETNGVTITFLPTQLAEQFMELENTSLRVLLTGGDKLKJIAVKKPYTLVNNY
GPTENTVVATSAEIHPEEGSLSIGRAIANTRVYILGEGNQVQPEGVAGELCVAGRGLARGY
LNREDETAKRFVADPFVPGERMYRTGDLVKWTGGGIEYIGRIDQQVKVRGYRIELSEIEV
QLAQLSEVQDAAVTAVKDKGGNTAIAAYVTPESADIEALKSALKETLPDYMIPAFWVTLN
ELPVTANGKVDRKALPEPDIEAGSGEYKAPTTDMEELLAGIWQDVLGMSEVGVTDNFFSL
GGDSIKGIQMASRLNQHGWKLEMKDLFQHPTIEELTQYV
>SrfAB-M4

SEQ ID NO: 5

LTPMQEGMLYHAMLDPHSSSYFTQLELGIHGAFDLEIFEKSVNELIRSYDILRTVFVHQQL
QKPRQVVLAERKTKVHYEDISHADENRQKEHIERYKQDVQRQGFNLAKDILFKVAVFRL
AADQLYLVWSNHHIMMDGWSMGVLMKSLFQNYEALRAGRTPANGQGKPYSDYIKWLG
KQDNEEAESYWSERLAGFEQPSVLPGRLPVKKDEYVNKEYSFTWDETLVARIQQTANLH
QVTGPNLFQAVWGIVLSKYNFTDDVIFGTVVSGRPSEINGIETMAGLFINTIPVRVKVERD
AAFADIFTAVQQHAVEAERYDYVPLYEIQKRSALDGNLLNHLVAFENYPLDQELENGSM
EDRLGFSIKVESAFEQTSFDFNLIVYPGKTWVKIKYNGAAFDSAFIERTAEHLTRMMEAA
VDQPAAFVREYGLVGDEEQRQIVEVFNSTKAELPEGMAVHQVFEEQAKRTPASTAVVYE
GTKLTYRELNAAANRLARKLVEHGLQKGETAAIMNDRSVETVVGMLAVLKAGAAYVPL
DPALPGDRLRFMAEDSSVRMVLIGNSYTGQAHQLQVPVLTLDIGFEESEAADNLNLPSAPS
DLAYIMYTSGSTGKPKGVMIEHKSILRLVKNAGYVPVTEEDRMAQTGAVSFDAGTFEVFG
ALLNGAALYPVKKETLLDAKQFAAFLREQSITTMWLTSPLFTSTQLAAKDAGMFGTLRHLII
GGDALVPHIVSKVKQASPSLSLWNGYGPTENTTFSTSFLIDREYGGSIPIGKPIGNSTAYIMD
EQQCLQPIGAPGELCVGGIGVARGYVNLPELTEKQFLEDPFRPGERIYRTGDLARWLPDGN
IEFLGRIDNQACWGFRFFTLGEIETKLNMAEHVTEAAVIIRKNKADENEICAYFTADREVAV
SELRKTLSQSLPDYMVPAHLIQMDSLPLTPNGKINKKELPAPQSEAVQPEYAAPKTESEKK
LAEIWEGILGVKAGVTDNFFMIGGHSLKAMMMTAKIQEHFHKEVPIKVLFEKPTIQELAL
YL
>SrfAB-M5

SEQ ID NO: 6

VSPAQRRMYILNQLGQANTSYNVPAVLLLEGEVDKDRLENAIQQLINRHEILRTSFDMIDG
EVVQTVHKNISFQLEAAKGREEDAEEIIKAFVQPFELNRAPLVRSKLVQLEEKRHLLLIDM
HHIITDGSSTGILIGDLAKIYQGADLELPQIHYKDYAVWHKEQTNYQKDEEYWLDVFKGE
LPILDLPADFERPAERSFAGERVMFGLDKQITAQIKSLMAETDTTMYMFLLAAFNVLLSKY
ASQDDIIVGSPTAGRTHPDLQGVPGMFVNTVALRTAPAGDKTFAQFLEEVKTASLQAFEH
QSYPLEELIEKLPLTRJSTSRSPLFSVMFNMQNMEIPSLRLGDLKISSYSMLHHVAKFDLSLE
AVEREEDIGLSFDYATALFKDETIRRWSRHFVNIIKAAAANPNVRLSDVDLLSSAETAALL
EERHMTQITEATFAALFEKQAQQTPDHSAVKAGGNLLTYRELDEQANQLAHHLRAQGAG
NEDIVAIVMDRSAEVMVSILGVMKAGAAFLPIDPDTPEERIRYSLEDSGAKFAVVNERNM
TAIGQYEGIIVSLDDGKWRNESKERPSSISGSRNLAYVIYTSGTTGKPKGVQIEHRNLTNYV
SWFSEEAGLTENDKTVLLSSYAFDLGYTSMFPVLLGGGELHIVQKETYTAPDEIAHYIKEH
GITYKLTPSLFHTIVNTASFAKDANFESLRLIVLGGEKIIPTDVIAFRKMYGHTEFINHYGPT
EATIGAIAGRVDLYEPDAFAKRPTIGRPIANAGALVLNEALKLVPPGASGQLYITGQGLAR
GYLNRPQLTAERFVENPYSPGSLMYKTGDVVRRLSDGTLAFIGRADDQVKIRGYRIEPKEI
ETVMLSLSGIQEAVVLAVSEGGLQELCAYYTSDQDIEKAELRYQLSLTLPSHMIPAFFVQV
DAIPLTANGKTDRNALPKPNAAQSGGKALAAPETALEESLCRIWQKTLGIEAIGHDDNFFD
LGGHSLKGMMLIANIQAELEKSVPLKALFEQPTVRQLAAY
>SrfAB-M6

SEQ ID NO: 7

LSSAQKRMYVLNQLDRQTISYNMPSVLLMEGELDISRLRDSLNQLVNRHESLRTSFMEAN
GEPVQRIIEKAEVDLHVFEAKEDEADQKIKEFIRPFDLNDAPLIRAALLRIEAKKHLLLLDM
HHIIADGVSRGIFVKELALLYKGEQLPEPTLHYKDFAVWQNEAEQKERMKEHEAYWMSV
LSGELPELDLPLDYARPPVQSFKGDTIRFRTGSETAKAVEKLLAETGTTLHMVLHAVFHVF
LSKISGQRDIVIGSVTAGRTNADVQDMPGMFVNTLALRMEAKEQQTFAELLELAKQTNLS
ALEHQEYPFEDLVNQLDLPRDMSRNPLFNVMVTTENPDKEQLTLQNLSISPYEAHQGTSK
FDLTLGGFTDENGIGLQLEYATDLFAKETAEKWSEYVLRLLKAVADNPNQPLSSLLLVTE
TEKQALLEAWKGKALPVPTDKTVHQLFEETVQRHKDRPAVTYNGQSWTYGELNAKANR
LARILMDCGISPDDRVGVLTKPSLEMSAAVLGVLKAGAAFVPIDPDYPDQRIEYILQDSGA
KLLLKQEGISVPDSYTGDVILLDGSRTILSLPLDENDEGNPETAVTAENLAYMIYTSGTTGQ
PKGVMVEHHALVNLCFWHHDAFSMTAEDRSAKYAGFGFDASIWEMFPTWTIGAELHVID
EAIRLDIVRLNDYFETNGVTITFLPTQLAEQFMELENTSLRVLLTGGDKLKRAVKKPYTLV
NNYGPTENTVVATSAEIHPEEGSLSIGRAIANTRVYILGEGNQVQPEGVAGELCVAGRGLA
RGYLNREDETAKRFVADPFVPGERMYRTGDLVKWVNGGIEYIGRIDQQVKVRGYRIELSE
IEVQLAQLSEVQDAAVTAVKDKGGNTAIAAYVTPETADIEALKSTLKETLPDYMIPAFWV
TLNELPVTANGKVDRKALPEPDIEAGSGEYKAPTTDMEELLAGIWQDVLGMSEVGVTDN
FFSLGGDSIKGIQMASRLNQHGWKLEMKDLFQHPTIEELTQYV
>SrfAC-M7 (C-A)

SEQ ID NO: 8

LSPMQEGMLFHAILNPGQSFYLEQITMKVKGSLNIKCLEESMNVIMDRYDVFRTVFIHEKV
KRPVQVVLKKRQFHIEEIDLTHLTGSEQTAKINEYKEQDKIRGFDLTRDIPMRAAIFKKAEE
SFEWVWSYHHIILDGWCFGIVVQDLFKVYNALREQKPYSLPPVKPYKDYIKWLEKQDKQ
ASLRYWREYLEGFEGQTTFAEQRKKQKDGYEPKELLFSLSEAETKAFTELAKSQHTTLST
ALQAVWSVLISRYQQSGDLAFGTVVSGRPAEIKGVEHMVGLFINVVPRRVKLSEGITFNG
LLKRLQEQSLQSEPHQYVPLYDIQSQADQPKLIDHIIVFENYPLQDAKNEESSENGFDMVD
VHVFEKSNYDLNLMASPGDEMLIKLAYNENVFDEAFILRLKSQLLTAIQQLIQNPDQPVST
INLVDDREREFLLTGLNPPAQAHETKPLTYWFKEAVNANPDAPALTYSGQTLSYRELDEE
ANRIARRLQKHGAGKGSVVALYTKRSLELVIGILGVLKAGAAYLPVDPKLPEDRISYMLA
DSAAACLLTHQEMKEQAAELPYTGTTLFIDDQTRFEEQASDPATAIDPNDPAYIMYTSGTT
GKPKGNITTHANIQGLVKHVDYMAFSDQDTFLSVSNYAFDAFTFDFYASMLNAARLIIAD
EHTLLDTERLTDLILQENVNVMFATTALFNLLTDAGEDWMKGLRCILFGGERASVPHVRK
ALRIMGPGKLINCYGPTEGTVFATAHVVHDLPDSISSLPIGKPISNASVYILNEQSQLQPFGA
VGELCISGMGVSKGYVNRADLTKEKFIENPFKPGETLYRTGDLARWLPDGTIEYAGRIDD
QVKIRGHRIELEEIEKQLQEYPGVKDAVVVADRHESGDASINAYLVNRTQLSAEDVKAHL
KKQLPAYMVPQTFTFLDELPLTTNGKVNKRLLPKPDQDQLAEEWIGPRNEMEETIAQIWS
EVLGRKQIGIHDDFFALGGHSLKAMTAASRIKKELGIDLPVKLLFEAPTIAGISAYL

SEQ ID NO: 9

KEKVISKWNETAKSEKLVSLQDMFEKQAVLTPERIALMCDDIQVNYRKLNEEANRLARLL
IEKGIGPEQFVALALPRSPEMVASMLGVLKTGAAYLPLDPEFPADRISYMLEDAKPSCIITT
EEIAASLPDDLAVPELVLDQAVTQEIIKRYSPENQDVSVSLDHPAYIIYTSGSTGRPKGVVV
TQKSLSNFLLSMQEAFSLGEEDRLLAVTTVAFDISALELYLPLISGAQIVIAKKETIREPQAL
AQMIENFDINIMQATPTLWYPIALVTSEPEKLRGLRVLVGGEALPSGLLQELQDLHCSVTNL
YGPTETTIWSAAAFLEEGLKGVPPIGKPIWNTQVYVLDNGLQPVPPGVVGELYIAGTGLAR
GYFHRPDLTAERFVADPYGPPGTRMYRTGDQARWRADGSLDYIGRADHQIKIRGFRIELG
EIDAVLANHPHIEQAAVVVREDQPGDKRLAAYVVADAAIDTAELRRYMGASLPDYMVPS
AFVEMDELPLTPNGKLDRKALPAPDFSTSVSDRA
dhbF

SEQ ID NO: 10

MPDTKDLQYSLTGAQTGIWFAQQLDPDNPIYNTAEYIEINGPVNIALFEEALRHVIKEAESL
HVRFGENMDGPWQMINPSPDVQLHVIDVSSEPDPEKTALNWMKADLAKPVDLGYAPLFN
EALFIAGPDRFFWYQRIHHIAIDGFGFSLIAQRVASTYTALIKGQTAKSRSFGSLQAILEEDT
DYRGSEQYEKDRQFWLDRFADAPEVVSLADRAPRTSNSFLRHTAYLPPSDVNALKEAAR
YFSGSWHEVMIAVSAVYVHRMTGSEDVVLGLPMMGRIGSASLNVPAMVMNLLPLRLTV
SSSMSFSELIQQISREIRSIRRHHKYRHEELRRDLKLIGENHRLFGPQINLMPFDYGLDFAGV
RGTTHNLSAGPVDDLSINVYDRTDGSGLRIDVDANPEVYSESDIKLHQQRILQLLQTASAG
EDMLIGQMELLLPEEKEKVISKWNETAKSEKLVSLQDMFEKQAVLTPERIALMCDDIQVN
YRKLNEEANRLARLLIEKGIGPEQFVALALPRSPEMVASMLGVLKTGAAYLPLDPEFPAD
RISYMLEDAKPSCIITTEEIAASLPDDLAVPELVLDQAVTQEIIKRYSPENQDVSVSLDHPAY
IIYTSGSTGRPKGVVVTQKSLSNFLLSMQEAFSLGEEDRLLAVTTVAFDISALELYLPLISGA
QIVIAKKETIREPQALAQMIENFDINIMQATPTLWHALVTSEPEKLRGLRVLVGGEALPSGL
LQELQDLHCSVTNLYGPTETTIWSAAAFLEEGLKGVPPIGKPIWNTQVYVLDNGLQPVPPG
VVGELYIAGTGLARGYFHRPDLTAERFVADPYGPPGTRMYRTGDQARWRADGSLDYIGR
ADHQIKIRGFRIELGEIDAVLANHPHIEQAAVVVREDQPGDKRLAAYVVADAAIDTAELR
RYMGASLPDYMVPSAFVEMDELPLTPNGKLDRKALPAPDFSTSVSDRAPRTPQEEILCDLF
AEVLGLARVGIDDSFFELGGHSLLAARLMSRIREVMGAELGIAKLFDEPTVAGLAAHLDL
AQSACPALQRAERPEKIPLSFAQRRLWFLHCLEGPSPTYNIPVAVRLSGELDQGLLKAALY
DLVCRHESLRTIFPESQGTSYQHILDADRACPELHVTEIAEKELSDRLAEAVRYSFDLAAEP
AFRAELFVIGPDEYVLLLLVHHIVGDGWSLTPLTRDLGTAYAARCHGRSPEWAPLAVQYA
DYALWQQELLGNEDDPNSLIAGQLAFWKETLKNLPDQLELPTDYSRPAEPSHDGDTIHFRI
EPEFHKRLQELARANRVSLFMVLQSGLAALLTRLGAGTDIPIGSPIAGRNDDALGDLVGLF
INTLVLRTDTSGDPSFRELLDRVREVNLAAYDNQDLPFERLVEVLNPARSRATHPLFQIML
AFQNTPDAELHLPDMESSLRINSVGSAKFDLTLEISEDRLADGTPNGMEGLLEYSTDLFKR
ETAQALADRLMRLLEAAESDPDEQIGNLDILAPEEHSSMVTDWQSVSEKIPHACLPEQFEK
QAALRPDAIAVVYENQELSYAELNERANRLARMMISEGVGPEQFVALALPRSLEMAVGL
LAVLKAGAAYLPLDPDYPADRIAFMLKDAQPAFIMTNTKAANHIPPVENVPKIVLDDPEL
AEKLNTYPAGNPKNKDRTQPLSPLNTAYVIYTSGSTGVPKGVMIPHQNVTRLFAATEHWF
RFSSGDIWTMFHSYAFDFSVWEIWGPLLHGGRLVIVPHHVSRSPEAFLRLLVKEGVTVLN
QTPSAFYQFMQAEREQPDLGQALSLRYVIFGGEALELSRLEDWYNRHPENRPQLINMYGI
TETTVHVSYIELDRSMAALRANSLIGCGIPDLGVYVLDERLQPVPPGVAGELYVSGAGLA
RGYLGRPGLTSERFIADPFGPPGTRMYRTGDVARLRADGSLDYVGRADHQVKIRGFRIEL
GEIEAALVQHPQLEDAAVIVREDQPGDKRLAAYVIPSEETFDTAELRRYAAERLPDYMVP
AAFVTMKELPLTPNGKLDRKALPAPDFAAAVTGRGPRTPQEEILCDLFMEVLHLPRVGID
DRFFDLGGHSLLAVQLMSRIREALGVELSIGNLFEAPTVAGLAERLEMGSSQSALDVLLPL
RTSGDKPPLFCVHPAGGLSWCYAGLMTNIGTDYPIYGLQARGIGQREELPKTLDDMAAD
YIKQIRTVQPKGPYHLLGWSLGGNVVQAMATQLQNQGEEVSLLVMLDAYPNHFLPIKEA
PDDEEALIALLALGGYDPDSLGEKPLDFEAAIEILRRDGSALASLDETVILNLKNTYVNSVG
ILGSYKPKTFRGNVLFFRSTIIPEWFDPIEPDSWKPYINGQIEQIDIDCRHKDLCQPEPLAQIG
KVLAVKLEELNK

SEQ ID NO: 11

EKQMILKTWNATGKTYPYITFHELFEQQAKKTPDRAAVSYEGQTLTYRELDEKSTQLAIY
LQAHGVGPDRLAGIYVDRSLDMLVGLLAILKAGGAYVPLDPSYPAERLEYMLEDSEVFIT
LTTSELVNTLSWNGVTTALLDQDWDEIAQTASDRKVLTRTVTPENLAYVIYTSGSTGKPK
GVMIPHKALTNFLVSMGETPGLTAEDKMLAVTTYCFDIAALELFLPLIKGAHCYICQTEHT
KDVEKLKRDIRAIKPTVMQATPATWKMLFYSGWENEESVKILCGGEALPETLKRYFLDTG
SEAWNMFGPTETTIWSAVQRINVECSHATIGRPIANTQIYITDSQLAPVPAGVPGELCIAGD
GVAKGYYKKEELTDSRFIDNPFEPGSKLYRTGDMARWLTGGRIEYIGRIDNQVKIRGFRIE
LGDIESRLSEHPGILECVVVADMDNLAAYYTAKHANASLTARELRHFVKNALPAYMVPS
YFIQLDHMPLTPNGKIDRNSLKNIDLSGEQLKQRQTS
Pksj (BSU17180)

SEQ ID NO: 12

MRNNDNIRILTNPSVSHGEPLHISEKQPATIPEVLYRTATELGDTKGIIYLQPDGTEVYQSY
RRLWDDGLRIAKGLRQSGLKAKQSVILQLGDNSQLLPAFWGCVLTGVVPAPLAVPPTYA
ESSSGTQKLKDAWTLLDKPAVITDRGMHQEMLDWAKEQGLEGFRAIIVEDLLSAEADTD
WHQSSPEDLALLLLTSGStGTPKAVMLNHRNIMSMVKGIIQMQGFTREDITFNWMPFDHV
GGIGMLHLRDVYLGCQEINVSSETILMEPLKWLDWIDHYRASVTWAPNFAFGLVTDFAEE
IKDKXWDLSSMRYMLNGGEAMVAKVGRRILELLEPHGLPADAIRPAWGMSETSSGVIFS
HEFTRAGTSDDDHFVEIGSPIPGFSMRIVNDHNELVEEGEIGRFQVSGLSVTSGYYQRPDLN
ESVFTEDGWFETGDLGFLRNGRLTITGRTKDAIIINGINYYSHAIESAVEELPEIETSYTAAC
AVRLGQNSTDQLAIFFVTSAKLNDEQMSQLLRNIQSHVSQVIGVTPEYLLPVQKEEIPKTAI
GKIQRTQLKTSFENGEFDHLLHKPNRMNDAVQDEGIQQADQVKRVREEIQKHLLTCLTEE
LHVSHDWVEPNANIQSLGVNSIKMMKLIRSIEKNYHIKLTAREIHQYPTIERLASYLSEHED
LSSLSADKKGTDTYKTEPERSQATFQPLSEVQKGLWTLQKMSPEKSAYHVPLCFKFSSGL
HHETFQQAFGLVLNQHPILKHVIQEKDGVPFLKNEPALSIEIKTENISSLKESDIPAFLRKKV
KEPYVKENSPLVRVMSFSRSEQEHFLLVVIHHLIFDGVSSVTFIRSLFDTYQLLLKGQQPEK
AVSPAIYHDFAAWEKNMLAGKDGVKHRTYWQKQLSGTLPNLQLPNVSASSVDSQFRED
TYTRRLSSGFMNQVTFAKEHSVNVTTVFLSCYMMLLGRYTGQKEQIVGMPAMVRPEER
FDDAIGHFLhMLPIRSELNPAJDTFSSFISKLQLTILDGLDHAAYPFPKMVRDLNIPRSQAGSP
VFQTAFFYQNFLQSGSYQSLLSRYADFFSVDFVEYIHQEGEYELVFELWETEEKMELNIKY
NTGLFDAASISAMFDHFVYVTEQAMLNPSQPLKEYSLLPEAEKQMILKTWNATGKTYPYI
TFHELFEQQAKKTPDRAAVSYEGQTLTYRELDEKSTQLAIYLQAHGVGPDRLAGIYVDRS
LDMLVGLLAILKAGGAYVPLDPSYPAERLEYMLEDSEVFITLTTSELVNTLSWNGVTTAL
LDQDWDEIAQTASDRKVLTRTVTPENLAYVIYTSGSTGKPKGVMIPHKALTNFLVSMGET
PGLTAEDKMLAVTTYCFDIAALELFLPLIKGAHCYICQTEHTKDVEKLKRDIRAIKPTVMQ
ATPATWKMLFYSGWENEESVKILCGGEALPETLKRYFLDTGSEAWNMFGPTETTIWSAV
QRINVECSHATIGRPIANTQIYITDSQLAPVPAGVPGELCIAGDGVAKGYYKKEELTDSRFI
DNPFEPGSKLYRTGDMARWLTGGRIEYIGRIDNQVKIRGFRIELGDIESRLSEHPGILECVV
VADMDNLAAYYTAKHANASLTARELRHFVKNALPAYMVPSYFIQLDHMPLTPNGKIDRN
SLKNIDLSGEQLKQRQTSPKNIQDTVFTIWQEVLKTSDIEWDDGFFDVGGDSLLAVTVAD
RIKHELSCEFSVTDLFEYSTIKNISQYITEQRMGDASDHIPTDPAAHIEDQSTEMSDLPDYYD
DSVAIIGISCEFPGAKNHDEFWENLRDGKESIAFFNKEELQRFGISKEIAENADYVPAKASID
GKDRFDPSFFQISPKDAEFMDPQLRMLLTHSWKAIEDAGYAARQIPQTSVFMSASNNSYRV
ALLPSDTTESLETPDGYVSWVLAQSGTIPTMISHKLGLRGPSYFVHANCSSSLIGLHSAYKS
LLSGESDYALVGGATLHTESNIGYVHQPGLNFSSDGHIKAFDASADGMIGGEGVAVVLLK
KAADAVKDGDHIYALLRGIGVNNDGADKVGFYAPSVKGQADVVQQVMNQTKVQPESIC
YVEAHGTGTKLGDPIELAALTNVYRQYTNKTQFCGIGSVKTNIGHLDTAAGLAGCIKVVM
SLYHQELAPSVNYKEPNPNTDLASSPFYVVDQKKTLSREIKTHRAALSSFGLGGTNTHAIF
EQFKRDSDKGKIDGTCIVPISAKNKERLQEYAEDILAYLERRGFENSQLPDFAYTLQVGRE
AMEHRVVFIADHVNELKQRLTDFINGNTAIEGCFQGSKHNAREVSWLTEDEDSAELIRKW
MAKGKVNKLAEMWSKGAHIDWMQLYKGERPNRMSLPTYPFAKERYWPSQDDRKPVAQ
ISGNQTGIGSIHPLLHQNTSDFSEQKFSSVFTGDEFFLRDHVVRGKPVLPGVAYLEMAYAAI
NQAAGSEIGQDVRIRLNHTVWVQPVVVDRHSAQVDISLFPEEDGKITFDIYSTQEDGDDPV
IHSQGSAELASAAETPVADLTEMSRRCGKGKMSPDQFYEEGRSRGMFHGPAFQGIKNVNI
GNREVLAQLQLPEIVSGTNEQFVLHPSIMDSALQTATICIMQELTDQKLILPFALEELEVIKG
CSSSMWAYARLSDSDHSGGVVQKADIDVIDESGTVCVRIKGFSTRVLEGEVHTSKPSTRH
ERLMLEPVWEKQNEEREDEDLSYTEHIIVLFETERSVTDSIASHMKDARVITLNEAVGHIA
ERYQCYMQNIFELLQSKVRKLSAGRIIIQAIVPLEKEKQLFAGVSGLFKTAEIEFSKLTAQVI
EIEKPEEMIDLHLKLKDDSRRPFDKQIRYEAGYRFVKGWREMVLPSADTLHMPWRDEGV
YLITGGAGSLGLLFAKEIANRTGRSTIVLTGRSVLSEDKENELEALRSIGAEVVYREADVSD
QHAVRHLLEEIKERYGTLNGIIHGAGSSKDRFIIHKTNEEFQEVLQPKVSGLLHVDECSKDF
PLDFFIFFSSVSGCLGNAGQADYAAANSFMDAFAEYRRSLAASKKRFGSTISFNWPLWEE
GGMQVGAEDEKRMLKTTGMVPMPTDSGLKAFYQGIVSDKPQVFVMEGQLQKMKQKLL
SAGSKAKRNDQRKADQDQGQTRKLEAALIQMVGAILKVNTDDIDVNTELSEYGFDSVTF
TVFTNKINEKFQLELTPTIFFEYGSVQSLAEYVVAAYQGEWNQDATAKGKDERTNLVHSL
SSLEASLSNMVSAILKVNSEDIDVNTELSEYGFDSVTFTVFTNKINEEFQLELTPTIFFEYGS
LHSLAEYLTVEHGDTLVQEREKPEGQEELQTKSSEAPKITSRRKRRFTQPIIKAERNKKQ
AADFEPVAIVGISGRFPGAMDIDEFWKNLEEGKDSITEWKDRWDWREHYGNPDTDVNK
TDIKWGGFIDGVAEFDPLFFGISPREADYVDPQQRLLMTYVWKALEDAGCSPQSLSGTGT
GIFIGTGNTGYKDLFHRANLPIEGHAATGHMIPSVGPNRMSYFLNIHGPSEPVETACSSSLV
AIHRAVTAMQNGDCEMAIAGGVNTILTEEAHISYSKAGMLSTDGRCKTFSADANGYVRG
EGVGMVMLKKLEDAERDGNHIYGVIRGTAENHGGRANTLTSPNPKAQADLLVRAYRQA
DIDPSTVTYIEAHGTGTELGDPIEINGLKAAFKELSNMRGESQPDVPDHRCGIGSVKSNIGH
LELAAGISGLIKVLLQMKHKTLVKSLHCETLNPYLQLTDSPFYIVQEKQEWKSVTDRDGN
ELPRRAGISSFGIGGVNAHIVIEEYNIPKANSEHTATEQPNVIVLSAKNKSRLIDRASQLLEV
RNKKYTDQDLHRIAYTLQVGREEMDERLACVAGTMQELEEKLQAFVDGKEETDEFFRGQ
SHRNKETQTIFTADEDMALALDAWIRKRKYAKLADLWVKGVSIQWNTLYGETKPRLISLP
SYPFAIQDHYWVPAKEHSERDKKELVNAIEDRAACFLTKQWSLSPIGSAVPGTRTVAILCC
QETADLAAEVSSYFPNHLLIDVSRIENDQSDIDWKEFDGLVDVIGCGWDDEGRLDWIEWV
QRLVEFGHKEGLRLLCVTKGLESFQNTSVRMAGASRAGLYRMLQCEYSHLISRHMDAEE
VTDHRRLAKLIADEFYSDSYDAEVCYRDGLRYQAFLKAHPETGKATEQSAVFPKDHVLLI
TGGTRGIGLLCARHFAECYGVKKLVLTGREQLPPREEWARFKTSNTSLAEKJQAVRELEA
KGVQVEMLSLTLSDDAQVEQTLQHIKRTLGPIGGVIHCAGLTDMDTLAFIRKTSDDIQRVL
EPKVSGLTTLYRHVCNEPLQFFVLFSSVSAIIPELSAGQADYAMANSYMDYFAEAHQKHA
PIISVQWPNWKETGMGEVTNQAYRDSGLLSITNSEGLRFLDQIVSKKFGPVVLPAMANQT
NWEPELLMKRRKPHEGGLQEAALQSPPARDIEEADEVSKCDGLLSETQSWLIDLFTEELRI
DREDFEIDGLFQDYGVDSIILAQVLQRINRKLEAALDPSILYEYPTIQRFADWLIGSYSERLS
ALFGGRISDASAPLENKIEAEASVPGKDRALTPQIQAPAILSPDSHAEGIAVVGLSCRFPGAE
TLESYWSLLSEGRSSIGPIPAERWGCKTPYYAGVIDGVSYFDPDFFLLHEEDVRAMDPQAL
LVLEECLKLLYHAGYTPEEIKGKPVGVYIGGRSQHKPDEDSLDHAKNPIVTVGQNYLAAN
LSQFFDVRGPSVVVDTACSSALVGMNMAIQALRGGDIQSAIVGGVSLLSSDASHRLFDRR
GILSKHSSFHVFDERADGVVLGEGVGMVMLKTVKQALEDGDIIYAVVKAASVNNDGRTA
GPATPNLEAQKEVMKDALFKSGKKPEDISYLEANGSGSIVTDLLELKAIQSVYRSGHSSPL
SLGSIKPNIGHPLCAEGIASFIKVVLMLKERRFVPFLSGEKEMAHFDQQKANITFSRALEKW
TDSQPTAAINCFADGGTNAHVIVEAWEKDEKHAIKRSPISPPQLKKRMLSPGEPKLEAETS
KMTAANIWDTYEVEV

SEQ ID NO: 13

cctttaacggatgcacaaaaacgaatttggtacacagaaaaattttatcctcacacgagcatttcaaatcttgcggggattggtaagctggtttcagc
tgatgcgattgattatgtgcttgttgagcaggcgattcaagagtttattcgcagaaatgacgccatgcgccttcggttgcggctagatgaaaacgg
ggagcctgttcaatatattagcgagtatcggcctgttgatataaaacatactgacactactgaagatccgaatgcgatagagtttatttcacaatgga
gccgggaggaaacgaagaaacctttgccgctatacgattgtgatttgttccgtttttccttgttcaccataaaggaaaatgaagtgtggttttacgca
aatgttcatcacgtgatttctgatggtatctccatgaatattctcgggaatgcgatcatgcacatttatttagaattagccagcggctcagagacaaaa
gaaggaatctcgcattcatttatcgatcatgttttatctgaacaggaatatgctcaatcgaagcggtttgaaaaggacaaggcgttttggaacaaac
aatttgaatcggtgcctgaacttgtttccttgaaacggaatgcatccgcagggggaagtttagatgctgagaggttctctaaagatgtgcctgaagc
gcttcatcagcagattctgtcgttttgtgaggcgaataaagtcagtgttctttcggtatttcaatcgctgctcgccgcctatttgtacagggtcagcgg
ccagaatgatgttgtgacgggaacatttatgggcaaccggacaaatgcgaaagagaagcagatgcttggcatgtttgtttctacggttccgcttcg
gacaaacattgacggcgggcaggcgttttcagaatttgtcaaagaccggatgaaggatctgatgaagacacttcgccaccaaaagtatccgtat
aatctcctaatcaacgatttgcgtgaaacaaagagctctctgaccaagctgttcacggtttctcttgaatatcaagtgatgcagtggcagaaagaag
aggatcttgcctttttgactgagccgattttcagcggcagcggattaaatgatgtctcaattcatgtaaaggatcgatgggatactgggaaactcac
catagattttgattaccgcactgatttattttcacgtgaagaaatcaacatgatttgtgagcgcatgattaccatgctggagaacgcgttaacgcatcc
agaacatacaattgatgaattaacactgatttctgatgcggagaagcagatgattctcaaaacatggaacgccacaggaaaaacgtatccatatat
aacttttcatgagttgtttgagcagcaggcgaaaaagacgcctgatagagcggctgtcagctatgaaggtcaaacattgacgtatcgggagcttg
atgagaaaagcacacagctggccatttatttgcaggcgcatggagtgggtcctgaccgtctggcggggatctatgtggatcgatcgctggacat
gctagtgggtttattagcgatcctcaaggctgggggagcgtatgtgccgctagacccgtcctatccggctgaacgattagaatacatgcttgagg
acagtgaagttttcattacactgacgacatcggaattagtaaatacgttgagttggaacggtgtcacaacagcccttttagatcaagattgggatga
aattgctcaaacagcctctgatcgaaaagtgcttacacgcactgtcacgccagagaacttggcatatgtcatttatacatccggcagcacaggaaa
gccaaaaggtgtcatgataccacataaagctttgacaaactttctcgtttcgatgggggaaacaccaggtcttacggcagaggataaaatgcttgc
tgtcacaacctactgttttgatattgcagctctggaattatttttgcctttaataaagggcgcacactgctatatttgtcaaacggagcatacaaaagac
gttgaaaaactgaaacgggacatccgcgcgatcaaaccgacagtgatgcaggcaacccccgctacgtggaagatgctcttttattcaggctgg
gaaaatgaagagagcgtgaaaattttatgcggtggcgaagcattgcctgagacattaaaacgatatttcttagatacgggcagcgaagcctgga
atatgttcgggccaaccgaaacaactatctggtcagcggttcagcgcattaacgttgaatgctctcatgccacgataggaaggccaatcgccaat
acacaaatctatattacggattctcagctcgcgccagtgccggcaggtgttccgggtgagctgtgcattgcaggagacggtgtggcgaagggct
actacaaaaaggaagaattaacggattcgagattcattgacaacccttttgagcctgggtctaagctttatagaacgggagacatggcccgttggc
ttacgggagggcgaattgaatatataggccgcatcgataatcaagtaaaaatccgcggattccgtattgaacttggtgatattgaaagcaggctta
gtgagcatcccggcattctggaatgcgttgtggtcgcagatatggataacctagctgcctattatacagctaaacatgcaaatgcttctctcacagc
gagagagctgcgtcattttgtgaaaaacgctttgcctgcctatatggtgccttcttattttattcagcttgatcatatgccgttaactccgaacggaaag
atagatagaaacagccttaagaatatcgatttatcaggggagcagctaaagcaaaggcagacctctcctaagaacattcaggatactgtttttacc
atttggcaggaagtgctgaaaacgagtgacattgaatgggatgacttctttgcgctcggagggcattccttgaaggccatgaccgccgcgtccc
gcatcaagaaagagctcgggattgatcttccagtgaagcttttgtttgaagcgccgacgatcgccggcatttcagcgtatttgaaaaacgggggct
ctgatggcttgcaggatgtaacgataatgaatcaggatcaggagcagatcattttcgcatttccgccggttctgggctatggccttatgtaccaaaa
tctgtccagccgcttgccgtcatacaagctatgcgcctttgattttattgaggaggaagaccggcttgaccgctatgcggatttgatccagaagctg
cagccggaagggcctttaacattgtttggatattcagcgggatgcagcctggcgtttgaagctgcgaaaaagcttgaggaacaaggccgtattgt
tcagcggatcatcatggtggattcctataaaaaacaaggtgtcagtgatctggacggacgcacggttgaaagtgatgtcgaagcgttgatgaatg
tcaatcgggacaatgaagcgctcaacagcgaagccgtcaaacacggcctcaagcaaaaaacacatgccttttactcatactacgtcaacctgat
cagcacaggccaggtgaaagcagatattgatctgttgacttccggcgctgattttgacatgccggaatggcttgcatcatgggaagaagctacaa
caggtgtttaccgtgtgaaaagaggcttcggaacacacgcagaaatgctgcagggcgaaacgctagataggaatgcggagattttgctcgaatt
tcttaatacacaaaccgtaacggtttcataa

SEQ ID NO: 14

cctttaacggatgcacaaaaacgaatttggtacacagaaaaattttatcctcacacgagcatttcaaatcttgcggggattggtaagctggtttcagc
tgatgcgattgattatgtgcttgttgagcaggcgattcaagagtttattcgcagaaatgacgccatgcgccttcggttgcggctagatgaaaacgg
ggagcctgttcaatatattagcgagtatcggcctgttgatataaaacatactgacactactgaagatccgaatgcgatagagtttatttcacaatgga
gccgggaggaaacgaagaaacctttgccgctatacgattgtgatttgttccgtttttccttgttcaccataaaggaaaatgaagtgtggttttacgca
aatgttcatcacgtgatttctgatggtatctccatgaatattctcgggaatgcgatcatgcacatttatttagaattagccagcggctcagagacaaaa
gaaggaatctcgcattcatttatcgatcatgttttatctgaacaggaatatgctcaatcgaagcggtttgaaaaggacaaggcgttttggaacaaac
aatttgaatcggtgcctgaacttgtttccttgaaacggaatgcatccgcagggggaagtttagatgctgagaggttctctaaagatgtgcctgaagc
gcttcatcagcagattctgtcgttttgtgaggcgaataaagtcagtgttctttcggtatttcaatcgctgctcgccgcctatttgtacagggtcagcgg
ccagaatgatgttgtgacgggaacatttatgggcaaccggacaaatgcgaaagagaagcagatgcttggcatgtttgtttctacggttccgcttcg
gacaaacattgacggcgggcaggcgttttcagaatttgtcaaagaccggatgaaggatctgatgaagacacttcgccaccaaaagtatccgtat
aatctcctaatcaacgatttgcgtgaaacaaagagctctctgaccaagctgttcacggtttctcttgaatatcaagtgatgcagtggcagaaagaag
aggatcttgcctttttgactgagccgattttcagcggcagcggattaaatgatgtctcaattcatgtaaaggatcgatgggatactgggaaactcac
catagattttgattaccgcactgatttattttcacgtgaagaaatcaacatgatttgtgagcgcatgattaccatgctggagaacgcgttaacgcatcc
agaacatacaattgatgaattaacactgatttctgatgcggagaagcagatgattctcaaaacatggaacgccacaggaaaaacgtatccatatat
aacttttcatgagttgtttgagcagcaggcgaaaaagacgcctgatagagcggctgtcagctatgaaggtcaaacattgacgtatcgggagcttg
atgagaaaagcacacagctggccatttatttgcaggcgcatggagtgggtcctgaccgtctggcggggatctatgtggatcgatcgctggacat
gctagtgggtttattagcgatcctcaaggctgggggagcgtatgtgccgctagacccgtcctatccggctgaacgattagaatacatgcttgagg
acagtgaagttttcattacactgacgacatcggaattagtaaatacgttgagttggaacggtgtcacaacagcccttttagatcaagattgggatga
aattgctcaaacagcctctgatcgaaaagtgcttacacgcactgtcacgccagagaacttggcatatgtcatttatacatccggcagcacaggaaa
gccaaaaggtgtcatgataccacataaagctttgacaaactttctcgtttcgatgggggaaacaccaggtcttacggcagaggataaaatgcttgc
tgtcacaacctactgttttgatattgcagctctggaattatttttgcctttaataaagggcgcacactgctatatttgtcaaacggagcatacaaaagac
gttgaaaaactgaaacgggacatccgcgcgatcaaaccgacagtgatgcaggcaacccccgctacgtggaagatgctcttttattcaggctgg
gaaaatgaagagagcgtgaaaattttatgcggtggcgaagcattgcctgagacattaaaacgatatttcttagatacgggcagcgaagcctgga
atatgttcgggccaaccgaaacaactatctggtcagcggttcagcgcattaacgttgaatgctctcatgccacgataggaaggccaatcgccaat
acacaaatctatattacggattctcagctcgcgccagtgccggcaggtgttccgggtgagctgtgcattgcaggagacggtgtggcgaagggct
actacaaaaaggaagaattaacggattcgagattcattgacaacccttttgagcctgggtctaagctttatagaacgggagacatggcccgttggc
ttacgggagggcgaattgaatatataggccgcatcgataatcaagtaaaaatccgcggattccgtattgaacttggtgatattgaaagcaggctta
gtgagcatcccggcattctggaatgcgttgtggtcgcagatatggataacctagctgcctattatacagctaaacatgcaaatgcttctctcacagc
gagagagctgcgtcattttgtgaaaaacgctttgcctgcctatatggtgccttcttattttattcagcttgatcatatgccgttaactccgaacggaaag
atagatagaaacagccttaagaatatcgatttatcaggggagcagctaaagcaaaggcagacctctcctaagaacattcaggatactgtttttacc
atttggcaggaagtgctgaacgttgagaaggcggggatctttgacttctttgcgctcggagggcattccttgaaggccatgaccgccgcgtcccg
catcaagaaagagctcgggattgatcttccagtgaagcttttgtttgaagcgccgacgatcgccggcatttcagcgtatttgaaaaacgggggctc
tgatggcttgcaggatgtaacgataatgaatcaggatcaggagcagatcattttcgcatttccgccggttctgggctatggccttatgtaccaaaat
ctgtccagccgcttgccgtcatacaagctatgcgcctttgattttattgaggaggaagaccggcttgaccgctatgcggatttgatccagaagctgc
agccggaagggcctttaacattgtttggatattcagcgggatgcagcctggcgtttgaagctgcgaaaaagcttgaggaacaaggccgtattgtt
cagcggatcatcatggtggattcctataaaaaacaaggtgtcagtgatctggacggacgcacggttgaaagtgatgtcgaagcgttgatgaatgt
caatcgggacaatgaagcgctcaacagcgaagccgtcaaacacggcctcaagcaaaaaacacatgccttttactcatactacgtcaacctgatc
agcacaggccaggtgaaagcagatattgatctgttgacttccggcgctgattttgacatgccggaatggcttgcatcatgggaagaagctacaac
aggtgtttaccgtgtgaaaagaggcttcggaacacacgcagaaatgctgcagggcgaaacgctagataggaatgcggagattttgctcgaattt
cttaatacacaaaccgtaacggtttcataa

SEQ ID NO: 15

cctttaacggatgcacaaaaacgaatttggtacacagaaaaattttatcctcacacgagcatttcaaatcttgcggggattggtaagctggtttcagc
tgatgcgattgattatgtgcttgttgagcaggcgattcaagagtttattcgcagaaatgacgccatgcgccttcggttgcggctagatgaaaacgg
ggagcctgttcaatatattagcgagtatcggcctgttgatataaaacatactgacactactgaagatccgaatgcgatagagtttatttcacaatgga
gccgggaggaaacgaagaaacctttgccgctatacgattgtgatttgttccgtttttccttgttcaccataaaggaaaatgaagtgtggttttacgca
aatgttcatcacgtgatttctgatggtatctccatgaatattctcgggaatgcgatcatgcacatttatttagaattagccagcggctcagagacaaaa
gaaggaatctcgcattcatttatcgatcatgttttatctgaacaggaatatgctcaatcgaagcggtttgaaaaggacaaggcgttttggaacaaac
aatttgaatcggtgcctgaacttgtttccttgaaacggaatgcatccgcagggggaagtttagatgctgagaggttctctaaagatgtgcctgaagc
gcttcatcagcagattctgtcgttttgtgaggcgaataaagtcagtgttctttcggtatttcaatcgctgctcgccgcctatttgtacagggtcagcgg
ccagaatgatgttgtgacgggaacatttatgggcaaccggacaaatgcgaaagagaagcagatgcttggcatgtttgtttctacggttccgcttcg
gacaaacattgacggcgggcaggcgttttcagaatttgtcaaagaccggatgaaggatctgatgaagacacttcgccaccaaaagtatccgtat
aatctcctaatcaacgatttgcgtgaaacaaagagctctctgaccaagctgttcacggtttctcttgaatatcaagtgatgcagtggcagaaagaag
aggatcttgcctttttgactgagccgattttcagcggcagcggattaaatgatgtctcaattcatgtaaaggatcgatgggatactgggaaactcac
catagattttgattaccgcactgatttattttcacgtgaagaaatcaacatgatttgtgagcgcatgattaccatgctggagaacgcgttaacgcatcc
agaacatacaattgatgaattaacactgatttctgatgcggagaaagaaaaagtcatttctaaatggaatgagacggcaaaatccgagaagctggt
cagccttcaggacatgttcgaaaagcaggcagttcttacgccagaacgtatcgctctcatgtgtgatgacattcaagtcaactatcgaaagctcaat
gaagaggcaaaccgcctcgcgcgtctgttgatcgaaaaagggattggtccggagcaatttgtcgctttggcgctgccgcgttcccctgagatgg
tggcttcaatgcttggtgtgctcaagactggtgcggcgtatctcccccttgatccggagtttccagccgaccgcatttcttacatgctggaggatgc
gaaaccttcatgcatcataacgactgaggaaatagcagccagtctgcctgatgacctggctgtacctgagcttgtgcttgatcaggctgttacaca
ggagattataaaacgctattcgccggaaaatcaggatgtatcggtttcgcttgaccatcctgcgtatatcatctatacctcaggatcaacaggaaga
ccgaagggagtcgttgtgacacagaaaagcttaagcaattttctgctgtctatgcaggaggcattttctctaggagaagaagacaggctgttggct
gtgacgactgtcgcttttgatatttcagcattggagttatatcttccgctgattagcggagcgcaaatcgtgatcgcaaagaaagaaacgatccgtg
agccgcaggcattagctcaaatgattgaaaatttcgatattaacattatgcaggcgacaccgacactgtggcacgctttggtaacgagtgaacctg
agaaacttcgggggcttagagtgcttgtaggaggcgaggcgctgccgagcggtcttttgcaggaacttcaagaccttcattgttcagtcacgaac
ttatacggtcccactgaaacaacgatttggtctgccgcagcttttcttgaagaagggctgaagggcgttcctccgattgggaaaccgatttggaac
acgcaggtgtatgtgcttgataatggattgcagccggtgccgccgggcgttgtcggagagctttatattgcaggaaccggcttggccagaggtta
tttccatcgtcctgatttaacggcggagcgcttcgttgcagatccatacggaccgccgggaactcggatgtatcggaccggagaccaggcccgc
tggcgcgccgatgggtctttggattatatcgggcgggcggatcatcaaatcaaaattcgcggattccgaattgaacttggagaaattgatgccgtg
cttgccaatcacccgcacattgaacaggccgcggttgtcgtacgggaagatcagccgggagacaaacgattggcggcttatgtagtcgctgat
gctgctattgatactgcagagcttcgtcgttatatgggggctagtcttcctgattatatggtaccgtcggcgtttgtggagatggacgagctgccgtt
aacacctaatggcaagcttgaccggaaagcactgccggcaccagacttcagcacatctgtcagtgatcgggccccgcggactcctcaggaag
agatattgtgtgacttgtttgcagaggttctcggtttggcacgcgtcggtatcgatgacttctttgcgctcggagggcattccttgaaggccatgacc
gccgcgtcccgcatcaagaaagagctcgggattgatcttccagtgaagcttttgtttgaagcgccgacgatcgccggcatttcagcgtatttgaaa
aacgggggctctgatggcttgcaggatgtaacgataatgaatcaggatcaggagcagatcattttcgcatttccgccggttctgggctatggcctt
atgtaccaaaatctgtccagccgcttgccgtcatacaagctatgcgcctttgattttattgaggaggaagaccggcttgaccgctatgcggatttgat
ccagaagctgcagccggaagggcctttaacattgtttggatattcagcgggatgcagcctggcgtttgaagctgcgaaaaagcttgaggaacaa
ggccgtattgttcagcggatcatcatggtggattcctataaaaaacaaggtgtcagtgatctggacggacgcacggttgaaagtgatgtcgaagc
gttgatgaatgtcaatcgggacaatgaagcgctcaacagcgaagccgtcaaacacggcctcaagcaaaaaacacatgccttttactcatactac
gtcaacctgatcagcacaggccaggtgaaagcagatattgatctgttgacttccggcgctgattttgacatgccggaatggcttgcatcatgggaa
gaagctacaacaggtgtttaccgtgtgaaaagaggcttcggaacacacgcagaaatgctgcagggcgaaacgctagataggaatgcggagat
tttgctcgaatttcttaatacacaaaccgtaacggtttcataa
ME-B0014

SEQ ID NO: 16

gaattcgcatgcatcgacaaaaatgtcatgaaagaatcgttgtaagacgctcttcgcaagggtgtctttttttgcctttttttcggtttttgcgcggtaca
catagtcatgtaaagattgtaaattgcattcagcaataaaaaaagattgaacgcagcagtttggtttaaaaatttttatttttctgtaaataatgtttagtg
gaaatgattgcggcatcccgcaaaaaatattgctgtaaataaactggaatctttcggcatcccgcatgaaacttttcacccatttttcggtgataaaa
acatttttttcatttaaactgaacggtagaaagataaaaaatattgaaaacaatgaataaatagccaaaattggtttcttattagggtggggtcttgcgg
tctttatccgcttatgttaaacgccgcaatgctgactgacggcagcctgctttaatagcggccatctgttttttgattggaagcactgctttttaagtgta
gtactttgggctatttcggctgttagttcataagaattaaaagctgatatggataagaaagagaaaatgcgttgcacatgttcactgcttataaagatt
aggggaggtatgacaatatggaaataactttttaccctttaacggatgcacaaaaacgaatttggtacacagaaaaattttatcctcacacgagcatt
tcaaatcttgcggggattggtaagctggtttcagctgatgcgattgattatgtgcttgttgagcaggcgattcaagagtttattcgcagaaatgacgc
catgcgccttcggttgcggctagatgaaaacggggagcctgttcaatatattagcgagtatcggcctgttgatataaaacatactgacactactga
agatccgaatgcgatagagtttatttcacaatggagccgggaggaaacgaagaaacctttgccgctatacgattgtgatttgttccgtttttccttgtt
caccataaaggaaaatgaagtgtggttttacgcaaatgttcatcacgtgatttctgatggtatctccatgaatattctcgggaatgcgatcatgcacat
ttatttagaattagccagcggctcagagacaaaagaaggaatctcgcattcatttatcgatcatgttttatctgaacaggaatatgctcaatcgaagc
ggtttgaaaaggacaaggcgttttggaacaaacaatttgaatcggtgcctgaacttgtttccttgaaacggaatgcatccgcagggggaagtttag
atgctgagaggttctctaaagatgtgcctgaagcgcttcatcagcagattctgtcgttttgtgaggcgaataaagtcagtgttctttcggtatttcaatc
gctgctcgccgcctatttgtacagggtcagcggccagaatgatgttgtgacgggaacatttatgggcaaccggacaaatgcgaaagagaagca
gatgcttggcatgtttgtttctacggttccgcttcggacaaacattgacggcgggcaggcgttttcagaatttgtcaaagaccggatgaaggatctg
atgaagacacttcgccaccaaaagtatccgtataatctcctaatcaacgatttgcgtgaaacaaagagctctctgaccaagctgttcacggtttctct
tgaatatcaagtgatgcagtggcagaaagaagaggatcttgcctttttgactgagccgattttcagcggcagcggattaaatgatgtctcaattcat
gtaaaggatcgatgggatactgggaaactcaccatagattttgattaccgcactgatttattttcacgtgaagaaatcaacatgatttgtgagcgcat
gattaccatgctggagaacgcgttaacgcatccagaacatacaattgatgaattaacactgctgttgccagaggagaaagaaaaagtcatttctaa
atggaatgagacggcaaaatccgagaagctggtcagccttcaggacatgttcgaaaagcaggcagttcttacgccagaacgtatcgctctcatg
tgtgatgacattcaagtcaactatcgaaagctcaatgaagaggcaaaccgcctcgcgcgtctgttgatcgaaaaagggattggtccggagcaatt
tgtcgctttggcgctgccgcgttcccctgagatggtggcttcaatgcttggtgtgctcaagactggtgcggcgtatctcccccttgatccggagtttc
cagccgaccgcatttcttacatgctggaggatgcgaaaccttcatgcatcataacgactgaggaaatagcagccagtctgcctgatgacctggct
gtacctgagcttgtgcttgatcaggctgttacacaggagattataaaacgctattcgccggaaaatcaggatgtatcggtttcgcttgaccatcctgc
gtatatcatctatacctcaggatcaacaggaagaccgaagggagtcgttgtgacacagaaaagcttaagcaattttctgctgtctatgcaggaggc
attttctctaggagaagaagacaggctgttggctgtgacgactgtcgcttttgatatttcagcattggagttatatcttccgctgattagcggagcgca
aatcgtgatcgcaaagaaagaaacgatccgtgagccgcaggcattagctcaaatgattgaaaatttcgatattaacattatgcaggcgacaccga
cactgtggcacgctttggtaacgagtgaacctgagaaacttcgggggcttagagtgcttgtaggaggcgaggcgctgccgagcggtcttttgca
ggaacttcaagaccttcattgttcagtcacgaacttatacggtcccactgaaacaacgatttggtctgccgcagcttttcttgaagaagggctgaag
ggcgttcctccgattgggaaaccgatttggaacacgcaggtgtatgtgcttgataatggattgcagccggtgccgccgggcgttgtcggagagc
tttatattgcaggaaccggcttggccagaggttatttccatcgtcctgatttaacggcggagcgcttcgttgcagatccatacggaccgccgggaa
ctcggatgtatcggaccggagaccaggcccgctggcgcgccgatgggtctttggattatatcgggcgggcggatcatcaaatcaaaattcgcg
gattccgaattgaacttggagaaattgatgccgtgcttgccaatcacccgcacattgaacaggccgcggttgtcgtacgggaagatcagccggg
agacaaacgattggcggcttatgtagtcgctgatgctgctattgatactgcagagcttcgtcgttatatgggggctagtcttcctgattatatggtacc
gtcggcgtttgtggagatggacgagctgccgttaacacctaatggcaagcttgaccggaaagcactgccggcaccagacttcagcacatctgtc
agtgatcgggccccgcggaacgagatggaagaaacaatcgcacaaatatggtctgaggttctcggcagaaagcaaattggcattcatgacgat
ttctttgcgctcggagggcattccttgaaggccatgaccgccgcgtcccgcatcaagaaagagctcgggattgatcttccagtgaagcttttgtttg
aagcgccgacgatcgccggcatttcagcgtatttgaaaaacgggggctctgatggcttgcaggatgtaacgataatgaatcaggatcaggagc
agatcattttcgcatttccgccggttctgggctatggccttatgtaccaaaatctgtccagccgcttgccgtcatacaagctatgcgcctttgattttatt
gaggaggaagaccggcttgaccgctatgcggatttgatccagaagctgcagccggaagggcctttaacattgtttggatattcagcgggatgca
gcctggcgtttgaagctgcgaaaaagcttgaggaacaaggccgtattgttcagcggatcatcatggtggattcctataaaaaacaaggtgtcagt
gatctggacggacgcacggttgaaagtgatgtcgaagcgttgatgaatgtcaatcgggacaatgaagcgctcaacagcgaagccgtcaaaca
cggcctcaagcaaaaaacacatgccttttactcatactacgtcaacctgatcagcacaggccaggtgaaagcagatattgatctgttgacttccgg
cgctgattttgacatgccggaatggcttgcatcatgggaagaagctacaacaggtgtttaccgtgtgaaaagaggcttcggaacacacgcagaa
atgctgcagggcgaaacgctagataggaatgcggagattttgctcgaatttcttaatacacaaaccgtaacggtttcataaatgaagtgatgaaag
gaggagacagccaatgagccaactcttcaaatcatttgatgcgtcggaaaaaacacagctcatctgttttccgtttgccggcggctattcggcgtc
gtttcgccctctccatgcttttttgcagggggagtgcgagatgctcgctgccgagccgccgggacacggcacgaatcaaacgtcagccattgag
gatctcgaagagctgacggatttgtacaagcaagaactgaaccttcgccctgatcggccgtttgtgctgttcggacacagtatgggcggaatgat
caccttcaggctggcgcaaaagcttgagcgtgaaggcatctttccgcaggcggttatcatttctgcaatccagccgcctcatattcagcggaaga
aagtgtcccacctgcctgatgatcagtttctcgatcatattatccaattaggcggaatgcccgcagagcttgttgaaaataaggaggtcatgtcctttt
tcctgccttctttccgatcagattaccgggctcttgaacaatttgagctttacgatctggcccagatccagtcgcctgttcatgtctttaacgggcttga
tgataaaaaatgcatacgagatgcggaagggtggaagaagtgggcaaaagacatcacattccatcaatttgacggcgggcacatgttcctgctg
tcacaaacggaagaagtcgcagaacggatttttgcgatcttgaatcagcatccgatcattcaaccgtgaagccgccccgcagggcgctccgca
ggccgcttccggaccactccggaagcggccgtgcggtcggaggatcc
ME-B0015

SEQ ID NO: 17

gaattcgcatgcatcgacaaaaatgtcatgaaagaatcgttgtaagacgctcttcgcaagggtgtctttttttgcctttttttcggtttttgcgcggtaca
catagtcatgtaaagattgtaaattgcattcagcaataaaaaaagattgaacgcagcagtttggtttaaaaatttttatttttctgtaaataatgtttagtg
gaaatgattgcggcatcccgcaaaaaatattgctgtaaataaactggaatctttcggcatcccgcatgaaacttttcacccatttttcggtgataaaa
acatttttttcatttaaactgaacggtagaaagataaaaaatattgaaaacaatgaataaatagccaaaattggtttcttattagggtggggtcttgcgg
tctttatccgcttatgttaaacgccgcaatgctgactgacggcagcctgctttaatagcggccatctgttttttgattggaagcactgctttttaagtgta
gtactttgggctatttcggctgttagttcataagaattaaaagctgatatggataagaaagagaaaatgcgttgcacatgttcactgcttataaagatt
aggggaggtatgacaatatggaaataactttttaccctttaacggatgcacaaaaacgaatttggtacacagaaaaattttatcctcacacgagcatt
tcaaatcttgcggggattggtaagctggtttcagctgatgcgattgattatgtgcttgttgagcaggcgattcaagagtttattcgcagaaatgacgc
catgcgccttcggttgcggctagatgaaaacggggagcctgttcaatatattagcgagtatcggcctgttgatataaaacatactgacactactga
agatccgaatgcgatagagtttatttcacaatggagccgggaggaaacgaagaaacctttgccgctatacgattgtgatttgttccgtttttccttgtt
caccataaaggaaaatgaagtgtggttttacgcaaatgttcatcacgtgatttctgatggtatctccatgaatattctcgggaatgcgatcatgcacat
ttatttagaattagccagcggctcagagacaaaagaaggaatctcgcattcatttatcgatcatgttttatctgaacaggaatatgctcaatcgaagc
ggtttgaaaaggacaaggcgttttggaacaaacaatttgaatcggtgcctgaacttgtttccttgaaacggaatgcatccgcagggggaagtttag
atgctgagaggttctctaaagatgtgcctgaagcgcttcatcagcagattctgtcgttttgtgaggcgaataaagtcagtgttctttcggtatttcaatc
gctgctcgccgcctatttgtacagggtcagcggccagaatgatgttgtgacgggaacatttatgggcaaccggacaaatgcgaaagagaagca
gatgcttggcatgtttgtttctacggttccgcttcggacaaacattgacggcgggcaggcgttttcagaatttgtcaaagaccggatgaaggatctg
atgaagacacttcgccaccaaaagtatccgtataatctcctaatcaacgatttgcgtgaaacaaagagctctctgaccaagctgttcacggtttctct
tgaatatcaagtgatgcagtggcagaaagaagaggatcttgcctttttgactgagccgattttcagcggcagcggattaaatgatgtctcaattcat
gtaaaggatcgatgggatactgggaaactcaccatagattttgattaccgcactgatttattttcacgtgaagaaatcaacatgatttgtgagcgcat
gattaccatgctggagaacgcgttaacgcatccagaacatacaattgatgaattaacactgctgttgccagaggagaaagaaaaagtcatttctaa
atggaatgagacggcaaaatccgagaagctggtcagccttcaggacatgttcgaaaagcaggcagttcttacgccagaacgtatcgctctcatg
tgtgatgacattcaagtcaactatcgaaagctcaatgaagaggcaaaccgcctcgcgcgtctgttgatcgaaaaagggattggtccggagcaatt
tgtcgctttggcgctgccgcgttcccctgagatggtggcttcaatgcttggtgtgctcaagactggtgcggcgtatctcccccttgatccggagtttc
cagccgaccgcatttcttacatgctggaggatgcgaaaccttcatgcatcataacgactgaggaaatagcagccagtctgcctgatgacctggct
gtacctgagcttgtgcttgatcaggctgttacacaggagattataaaacgctattcgccggaaaatcaggatgtatcggtttcgcttgaccatcctgc
gtatatcatctatacctcaggatcaacaggaagaccgaagggagtcgttgtgacacagaaaagcttaagcaattttctgctgtctatgcaggaggc
attttctctaggagaagaagacaggctgttggctgtgacgactgtcgcttttgatatttcagcattggagttatatcttccgctgattagcggagcgca
aatcgtgatcgcaaagaaagaaacgatccgtgagccgcaggcattagctcaaatgattgaaaatttcgatattaacattatgcaggcgacaccga
cactgtggcacgctttggtaacgagtgaacctgagaaacttcgggggcttagagtgcttgtaggaggcgaggcgctgccgagcggtcttttgca
ggaacttcaagaccttcattgttcagtcacgaacttatacggtcccactgaaacaacgatttggtctgccgcagcttttcttgaagaagggctgaag
ggcgttcctccgattgggaaaccgatttggaacacgcaggtgtatgtgcttgataatggattgcagccggtgccgccgggcgttgtcggagagc
tttatattgcaggaaccggcttggccagaggttatttccatcgtcctgatttaacggcggagcgcttcgttgcagatccatacggaccgccgggaa
ctcggatgtatcggaccggagaccaggcccgctggcgcgccgatgggtctttggattatatcgggcgggcggatcatcaaatcaaaattcgcg
gattccgaattgaacttggagaaattgatgccgtgcttgccaatcacccgcacattgaacaggccgcggttgtcgtacgggaagatcagccggg
agacaaacgattggcggcttatgtagtcgctgatgctgctattgatactgcagagcttcgtcgttatatgggggctagtcttcctgattatatggtacc
gtcggcgtttgtggagatggacgagctgccgttaacacctaatggcaagcttgaccggaaagcactgccggcaccagacttcagcacatctgtc
agtgatcgggccccgcggactcctcaggaagagatattgtgtgacttgtttgcagaggttctcggtttggcacgcgtcggtatcgatgacgatttct
ttgcgctcggagggcattccttgaaggccatgaccgccgcgtcccgcatcaagaaagagctcgggattgatcttccagtgaagcttttgtttgaag
cgccgacgatcgccggcatttcagcgtatttgaaaaacgggggctctgatggcttgcaggatgtaacgataatgaatcaggatcaggagcagat
cattttcgcatttccgccggttctgggctatggccttatgtaccaaaatctgtccagccgcttgccgtcatacaagctatgcgcctttgattttattgag
gaggaagaccggcttgaccgctatgcggatttgatccagaagctgcagccggaagggcctttaacattgtttggatattcagcgggatgcagcc
tggcgtttgaagctgcgaaaaagcttgaggaacaaggccgtattgttcagcggatcatcatggtggattcctataaaaaacaaggtgtcagtgatc
tggacggacgcacggttgaaagtgatgtcgaagcgttgatgaatgtcaatcgggacaatgaagcgctcaacagcgaagccgtcaaacacggc
ctcaagcaaaaaacacatgccttttactcatactacgtcaacctgatcagcacaggccaggtgaaagcagatattgatctgttgacttccggcgct
gattttgacatgccggaatggcttgcatcatgggaagaagctacaacaggtgtttaccgtgtgaaaagaggcttcggaacacacgcagaaatgc
tgcagggcgaaacgctagataggaatgcggagattttgctcgaatttcttaatacacaaaccgtaacggtttcataaatgaagtgatgaaaggag
gagacagccaatgagccaactcttcaaatcatttgatgcgtcggaaaaaacacagctcatctgttttccgtttgccggcggctattcggcgtcgttt
cgccctctccatgcttttttgcagggggagtgcgagatgctcgctgccgagccgccgggacacggcacgaatcaaacgtcagccattgaggat
ctcgaagagctgacggatttgtacaagcaagaactgaaccttcgccctgatcggccgtttgtgctgttcggacacagtatgggcggaatgatcac
cttcaggctggcgcaaaagcttgagcgtgaaggcatctttccgcaggcggttatcatttctgcaatccagccgcctcatattcagcggaagaaagt
gtcccacctgcctgatgatcagtttctcgatcatattatccaattaggcggaatgcccgcagagcttgttgaaaataaggaggtcatgtcctttttcct
gccttctttccgatcagattaccgggctcttgaacaatttgagctttacgatctggcccagatccagtcgcctgttcatgtctttaacgggcttgatgat
aaaaaatgcatacgagatgcggaagggtggaagaagtgggcaaaagacatcacattccatcaatttgacggcgggcacatgttcctgctgtca
caaacggaagaagtcgcagaacggatttttgcgatcttgaatcagcatccgatcattcaaccgtgaagccgccccgcagggcgctccgcaggc
cgcttccggaccactccggaagcggccgtgcggtcggaggatcc
ME-B0016

SEQ ID NO: 18

gaattcgcatgcatcgacaaaaatgtcatgaaagaatcgttgtaagacgctcttcgcaagggtgtcttttmgcctttttttcggtttttgcgcggtaca
catagtcatgtaaagattgtaaattgcattcagcaataaaaaaagattgaacgcagcagtttggtttaaaaatttttatttttctgtaaataatgtttagtg
gaaatgattgcggcatcccgcaaaaaatattgctgtaaataaactggaatctttcggcatcccgcatgaaacttttcacccatttttcggtgataaaa
acatttttttcatttaaactgaacggtagaaagataaaaaatattgaaaacaatgaataaatagccaaaattggtttcttattagggtggggtcttgcgg
tctttatccgcttatgttaaacgccgcaatgctgactgacggcagcctgctttaatagcggccatctgttttttgattggaagcactgctttttaagtgta
gtactttgggctatttcggctgttagttcataagaattaaaagctgatatggataagaaagagaaaatgcgttgcacatgttcactgcttataaagatt
aggggaggtatgacaatatggaaataactttttaccctttaacggatgcacaaaaacgaatttggtacacagaaaaattttatcctcacacgagcatt
tcaaatcttgcggggattggtaagctggtttcagctgatgcgattgattatgtgcttgttgagcaggcgattcaagagtttattcgcagaaatgacgc
catgcgccttcggttgcggctagatgaaaacggggagcctgttcaatatattagcgagtatcggcctgttgatataaaacatactgacactactga
agatccgaatgcgatagagtttatttcacaatggagccgggaggaaacgaagaaacctttgccgctatacgattgtgatttgttccgtttttccttgtt
caccataaaggaaaatgaagtgtggttttacgcaaatgttcatcacgtgatttctgatggtatctccatgaatattctcgggaatgcgatcatgcacat
ttatttagaattagccagcggctcagagacaaaagaaggaatctcgcattcatttatcgatcatgttttatctgaacaggaatatgctcaatcgaagc
ggtttgaaaaggacaaggcgttttggaacaaacaatttgaatcggtgcctgaacttgtttccttgaaacggaatgcatccgcagggggaagtttag
atgctgagaggttctctaaagatgtgcctgaagcgcttcatcagcagattctgtcgttttgtgaggcgaataaagtcagtgttctttcggtatttcaatc
gctgctcgccgcctatttgtacagggtcagcggccagaatgatgttgtgacgggaacatttatgggcaaccggacaaatgcgaaagagaagca
gatgcttggcatgtttgtttctacggttccgcttcggacaaacattgacggcgggcaggcgttttcagaatttgtcaaagaccggatgaaggatctg
atgaagacacttcgccaccaaaagtatccgtataatctcctaatcaacgatttgcgtgaaacaaagagctctctgaccaagctgttcacggtttctct
tgaatatcaagtgatgcagtggcagaaagaagaggatcttgcctttttgactgagccgattttcagcggcagcggattaaatgatgtctcaattcat
gtaaaggatcgatgggatactgggaaactcaccatagattttgattaccgcactgatttattttcacgtgaagaaatcaacatgatttgtgagcgcat
gattaccatgctggagaacgcgttaacgcatccagaacatacaattgatgaattaacactgatttctgatgcggagaaagaaaaagtcatttctaaa
tggaatgagacggcaaaatccgagaagctggtcagccttcaggacatgttcgaaaagcaggcagttcttacgccagaacgtatcgctctcatgt
gtgatgacattcaagtcaactatcgaaagctcaatgaagaggcaaaccgcctcgcgcgtctgttgatcgaaaaagggattggtccggagcaattt
gtcgctttggcgctgccgcgttcccctgagatggtggcttcaatgcttggtgtgctcaagactggtgcggcgtatctcccccttgatccggagtttc
cagccgaccgcatttcttacatgctggaggatgcgaaaccttcatgcatcataacgactgaggaaatagcagccagtctgcctgatgacctggct
gtacctgagcttgtgcttgatcaggctgttacacaggagattataaaacgctattcgccggaaaatcaggatgtatcggtttcgcttgaccatcctgc
gtatatcatctatacctcaggatcaacaggaagaccgaagggagtcgttgtgacacagaaaagcttaagcaattttctgctgtctatgcaggaggc
attttctctaggagaagaagacaggctgttggctgtgacgactgtcgcttttgatatttcagcattggagttatatcttccgctgattagcggagcgca
aatcgtgatcgcaaagaaagaaacgatccgtgagccgcaggcattagctcaaatgattgaaaatttcgatattaacattatgcaggcgacaccga
cactgtggcacgctttggtaacgagtgaacctgagaaacttcgggggcttagagtgcttgtaggaggcgaggcgctgccgagcggtcttttgca
ggaacttcaagaccttcattgttcagtcacgaacttatacggtcccactgaaacaacgatttggtctgccgcagcttttcttgaagaagggctgaag
ggcgttcctccgattgggaaaccgatttggaacacgcaggtgtatgtgcttgataatggattgcagccggtgccgccgggcgttgtcggagagc
tttatattgcaggaaccggcttggccagaggttatttccatcgtcctgatttaacggcggagcgcttcgttgcagatccatacggaccgccgggaa
ctcggatgtatcggaccggagaccaggcccgctggcgcgccgatgggtctttggattatatcgggcgggcggatcatcaaatcaaaattcgcg
gattccgaattgaacttggagaaattgatgccgtgcttgccaatcacccgcacattgaacaggccgcggttgtcgtacgggaagatcagccggg
agacaaacgattggcggcttatgtagtcgctgatgctgctattgatactgcagagcttcgtcgttatatgggggctagtcttcctgattatatggtacc
gtcggcgtttgtggagatggacgagctgccgttaacacctaatggcaagcttgaccggaaagcactgccggcaccagacttcagcacatctgtc
agtgatcgggccccgcggactcctcaggaagagatattgtgtgacttgtttgcagaggttctcggcagaaagcaaattggcattcatgacgatttc
tttgcgctcggagggcattccttgaaggccatgaccgccgcgtcccgcatcaagaaagagctcgggattgatcttccagtgaagcttttgtttgaa
gcgccgacgatcgccggcatttcagcgtatttgaaaaacgggggctctgatggcttgcaggatgtaacgataatgaatcaggatcaggagcag
atcattttcgcatttccgccggttctgggctatggccttatgtaccaaaatctgtccagccgcttgccgtcatacaagctatgcgcctttgattttattga
ggaggaagaccggcttgaccgctatgcggatttgatccagaagctgcagccggaagggcctttaacattgtttggatattcagcgggatgcagc
ctggcgtttgaagctgcgaaaaagcttgaggaacaaggccgtattgttcagcggatcatcatggtggattcctataaaaaacaaggtgtcagtgat
ctggacggacgcacggttgaaagtgatgtcgaagcgttgatgaatgtcaatcgggacaatgaagcgctcaacagcgaagccgtcaaacacgg
cctcaagcaaaaaacacatgccttttactcatactacgtcaacctgatcagcacaggccaggtgaaagcagatattgatctgttgacttccggcgc
tgattttgacatgccggaatggcttgcatcatgggaagaagctacaacaggtgtttaccgtgtgaaaagaggcttcggaacacacgcagaaatg
ctgcagggcgaaacgctagataggaatgcggagattttgctcgaatttcttaatacacaaaccgtaacggtttcataaatgaagtgatgaaaggag
gagacagccaatgagccaactcttcaaatcatttgatgcgtcggaaaaaacacagctcatctgttttccgtttgccggcggctattcggcgtcgttt
cgccctctccatgcttttttgcagggggagtgcgagatgctcgctgccgagccgccgggacacggcacgaatcaaacgtcagccattgaggat
ctcgaagagctgacggatttgtacaagcaagaactgaaccttcgccctgatcggccgtttgtgctgttcggacacagtatgggcggaatgatcac
cttcaggctggcgcaaaagcttgagcgtgaaggcatctttccgcaggcggttatcatttctgcaatccagccgcctcatattcagcggaagaaagt
gtcccacctgcctgatgatcagtttctcgatcatattatccaattaggcggaatgcccgcagagcttgttgaaaataaggaggtcatgtcctttttcct
gccttctttccgatcagattaccgggctcttgaacaatttgagctttacgatctggcccagatccagtcgcctgttcatgtctttaacgggcttgatgat
aaaaaatgcatacgagatgcggaagggtggaagaagtgggcaaaagacatcacattccatcaatttgacggcgggcacatgttcctgctgtca
caaacggaagaagtcgcagaacggatttttgcgatcttgaatcagcatccgatcattcaaccgtgaagccgccccgcagggcgctccgcaggc
cgcttccggaccactccggaagcggccgtgcggtcggaggatcc
ME-B0017

SEQ ID NO: 19

gaattcgcatgcatcgacaaaaatgtcatgaaagaatcgttgtaagacgctcttcgcaagggtgtctttttttgcctttttttcggtttttgcgcggtaca
catagtcatgtaaagattgtaaattgcattcagcaataaaaaaagattgaacgcagcagtttggtttaaaaatttttatttttctgtaaataatgtttagtg
gaaatgattgcggcatcccgcaaaaaatattgctgtaaataaactggaatctttcggcatcccgcatgaaacttttcacccatttttcggtgataaaa
acatttttttcatttaaactgaacggtagaaagataaaaaatattgaaaacaatgaataaatagccaaaattggtttcttattagggtggggtcttgcgg
tctttatccgcttatgttaaacgccgcaatgctgactgacggcagcctgctttaatagcggccatctgttttttgattggaagcactgctttttaagtgta
gtactttgggctatttcggctgttagttcataagaattaaaagctgatatggataagaaagagaaaatgcgttgcacatgttcactgcttataaagatt
aggggaggtatgacaatatggaaataactttttaccctttaacggatgcacaaaaacgaatttggtacacagaaaaattttatcctcacacgagcatt
tcaaatcttgcggggattggtaagctggtttcagctgatgcgattgattatgtgcttgttgagcaggcgattcaagagtttattcgcagaaatgacgc
catgcgccttcggttgcggctagatgaaaacggggagcctgttcaatatattagcgagtatcggcctgttgatataaaacatactgacactactga
agatccgaatgcgatagagtttatttcacaatggagccgggaggaaacgaagaaacctttgccgctatacgattgtgatttgttccgtttttccttgtt
caccataaaggaaaatgaagtgtggttttacgcaaatgttcatcacgtgatttctgatggtatctccatgaatattctcgggaatgcgatcatgcacat
ttatttagaattagccagcggctcagagacaaaagaaggaatctcgcattcatttatcgatcatgttttatctgaacaggaatatgctcaatcgaagc
ggtttgaaaaggacaaggcgttttggaacaaacaatttgaatcggtgcctgaacttgtttccttgaaacggaatgcatccgcagggggaagtttag
atgctgagaggttctctaaagatgtgcctgaagcgcttcatcagcagattctgtcgttttgtgaggcgaataaagtcagtgttctttcggtatttcaatc
gctgctcgccgcctatttgtacagggtcagcggccagaatgatgttgtgacgggaacatttatgggcaaccggacaaatgcgaaagagaagca
gatgcttggcatgtttgtttctacggttccgcttcggacaaacattgacggcgggcaggcgttttcagaatttgtcaaagaccggatgaaggatctg
atgaagacacttcgccaccaaaagtatccgtataatctcctaatcaacgatttgcgtgaaacaaagagctctctgaccaagctgttcacggtttctct
tgaatatcaagtgatgcagtggcagaaagaagaggatcttgcctttttgactgagccgattttcagcggcagcggattaaatgatgtctcaattcat
gtaaaggatcgatgggatactgggaaactcaccatagattttgattaccgcactgatttattttcacgtgaagaaatcaacatgatttgtgagcgcat
gattaccatgctggagaacgcgttaacgcatccagaacatacaattgatgaattaacactgatttctgatgcggagaaagaaaaagtcatttctaaa
tggaatgagacggcaaaatccgagaagctggtcagccttcaggacatgttcgaaaagcaggcagttcttacgccagaacgtatcgctctcatgt
gtgatgacattcaagtcaactatcgaaagctcaatgaagaggcaaaccgcctcgcgcgtctgttgatcgaaaaagggattggtccggagcaattt
gtcgctttggcgctgccgcgttcccctgagatggtggcttcaatgcttggtgtgctcaagactggtgcggcgtatctcccccttgatccggagtttc
cagccgaccgcatttcttacatgctggaggatgcgaaaccttcatgcatcataacgactgaggaaatagcagccagtctgcctgatgacctggct
gtacctgagcttgtgcttgatcaggctgttacacaggagattataaaacgctattcgccggaaaatcaggatgtatcggtttcgcttgaccatcctgc
gtatatcatctatacctcaggatcaacaggaagaccgaagggagtcgttgtgacacagaaaagcttaagcaattttctgctgtctatgcaggaggc
attttctctaggagaagaagacaggctgttggctgtgacgactgtcgcttttgatatttcagcattggagttatatcttccgctgattagcggagcgca
aatcgtgatcgcaaagaaagaaacgatccgtgagccgcaggcattagctcaaatgattgaaaatttcgatattaacattatgcaggcgacaccga
cactgtggcacgctttggtaacgagtgaacctgagaaacttcgggggcttagagtgcttgtaggaggcgaggcgctgccgagcggtcttttgca
ggaacttcaagaccttcattgttcagtcacgaacttatacggtcccactgaaacaacgatttggtctgccgcagcttttcttgaagaagggctgaag
ggcgttcctccgattgggaaaccgatttggaacacgcaggtgtatgtgcttgataatggattgcagccggtgccgccgggcgttgtcggagagc
tttatattgcaggaaccggcttggccagaggttatttccatcgtcctgatttaacggcggagcgcttcgttgcagatccatacggaccgccgggaa
ctcggatgtatcggaccggagaccaggcccgctggcgcgccgatgggtctttggattatatcgggcgggcggatcatcaaatcaaaattcgcg
gattccgaattgaacttggagaaattgatgccgtgcttgccaatcacccgcacattgaacaggccgcggttgtcgtacgggaagatcagccggg
agacaaacgattggcggcttatgtagtcgctgatgctgctattgatactgcagagcttcgtcgttatatgggggctagtcttcctgattatatggtacc
gtcggcgtttgtggagatggacgagctgccgttaacacctaatggcaagcttgaccggaaagcactgccggcaccagacttcagcacatctgtc
agtgatcgggccccgcggactcctcaggaagaaacaatcgcacaaatatggtctgaggttctcggcagaaagcaaattggcattcatgacgatt
tctttgcgctcggagggcattccttgaaggccatgaccgccgcgtcccgcatcaagaaagagctcgggattgatcttccagtgaagcttttgtttg
aagcgccgacgatcgccggcatttcagcgtatttgaaaaacgggggctctgatggcttgcaggatgtaacgataatgaatcaggatcaggagc
agatcattttcgcatttccgccggttctgggctatggccttatgtaccaaaatctgtccagccgcttgccgtcatacaagctatgcgcctttgattttatt
gaggaggaagaccggcttgaccgctatgcggatttgatccagaagctgcagccggaagggcctttaacattgtttggatattcagcgggatgca
gcctggcgtttgaagctgcgaaaaagcttgaggaacaaggccgtattgttcagcggatcatcatggtggattcctataaaaaacaaggtgtcagt
gatctggacggacgcacggttgaaagtgatgtcgaagcgttgatgaatgtcaatcgggacaatgaagcgctcaacagcgaagccgtcaaaca
cggcctcaagcaaaaaacacatgccttttactcatactacgtcaacctgatcagcacaggccaggtgaaagcagatattgatctgttgacttccgg
cgctgattttgacatgccggaatggcttgcatcatgggaagaagctacaacaggtgtttaccgtgtgaaaagaggcttcggaacacacgcagaa
atgctgcagggcgaaacgctagataggaatgcggagattttgctcgaatttcttaatacacaaaccgtaacggtttcataaatgaagtgatgaaag
gaggagacagccaatgagccaactcttcaaatcatttgatgcgtcggaaaaaacacagctcatctgttttccgtttgccggcggctattcggcgtc
gtttcgccctctccatgcttttttgcagggggagtgcgagatgctcgctgccgagccgccgggacacggcacgaatcaaacgtcagccattgag
gatctcgaagagctgacggatttgtacaagcaagaactgaaccttcgccctgatcggccgtttgtgctgttcggacacagtatgggcggaatgat
caccttcaggctggcgcaaaagcttgagcgtgaaggcatctttccgcaggcggttatcatttctgcaatccagccgcctcatattcagcggaaga
aagtgtcccacctgcctgatgatcagtttctcgatcatattatccaattaggcggaatgcccgcagagcttgttgaaaataaggaggtcatgtcctttt
tcctgccttctttccgatcagattaccgggctcttgaacaatttgagctttacgatctggcccagatccagtcgcctgttcatgtctttaacgggcttga
tgataaaaaatgcatacgagatgcggaagggtggaagaagtgggcaaaagacatcacattccatcaatttgacggcgggcacatgttcctgctg
tcacaaacggaagaagtcgcagaacggatttttgcgatcttgaatcagcatccgatcattcaaccgtgaagccgccccgcagggcgctccgca
ggccgcttccggaccactccggaagcggccgtgcggtcggaggatcc
ME-B0018

SEQ ID NO: 20

gaattcgcatgcatcgacaaaaatgtcatgaaagaatcgttgtaagacgctcttcgcaagggtgtctttttttgcctttttttcggtttttgcgcggtaca
catagtcatgtaaagattgtaaattgcattcagcaataaaaaaagattgaacgcagcagtttggtttaaaaatttttatttttctgtaaataatgtttagtg
gaaatgattgcggcatcccgcaaaaaatattgctgtaaataaactggaatctttcggcatcccgcatgaaacttttcacccatttttcggtgataaaa
acatttttttcatttaaactgaacggtagaaagataaaaaatattgaaaacaatgaataaatagccaaaattggtttcttattagggtggggtcttgcgg
tctttatccgcttatgttaaacgccgcaatgctgactgacggcagcctgctttaatagcggccatctgttttttgattggaagcactgctttttaagtgta
gtactttgggctatttcggctgttagttcataagaattaaaagctgatatggataagaaagagaaaatgcgttgcacatgttcactgcttataaagatt
aggggaggtatgacaatatggaaataactttttaccctttaacggatgcacaaaaacgaatttggtacacagaaaaattttatcctcacacgagcatt
tcaaatcttgcggggattggtaagctggtttcagctgatgcgattgattatgtgcttgttgagcaggcgattcaagagtttattcgcagaaatgacgc
catgcgccttcggttgcggctagatgaaaacggggagcctgttcaatatattagcgagtatcggcctgttgatataaaacatactgacactactga
agatccgaatgcgatagagtttatttcacaatggagccgggaggaaacgaagaaacctttgccgctatacgattgtgatttgttccgtttttccttgtt
caccataaaggaaaatgaagtgtggttttacgcaaatgttcatcacgtgatttctgatggtatctccatgaatattctcgggaatgcgatcatgcacat
ttatttagaattagccagcggctcagagacaaaagaaggaatctcgcattcatttatcgatcatgttttatctgaacaggaatatgctcaatcgaagc
ggtttgaaaaggacaaggcgttttggaacaaacaatttgaatcggtgcctgaacttgtttccttgaaacggaatgcatccgcagggggaagtttag
atgctgagaggttctctaaagatgtgcctgaagcgcttcatcagcagattctgtcgttttgtgaggcgaataaagtcagtgttctttcggtatttcaatc
gctgctcgccgcctatttgtacagggtcagcggccagaatgatgttgtgacgggaacatttatgggcaaccggacaaatgcgaaagagaagca
gatgcttggcatgtttgtttctacggttccgcttcggacaaacattgacggcgggcaggcgttttcagaatttgtcaaagaccggatgaaggatctg
atgaagacacttcgccaccaaaagtatccgtataatctcctaatcaacgatttgcgtgaaacaaagagctctctgaccaagctgttcacggtttctct
tgaatatcaagtgatgcagtggcagaaagaagaggatcttgcctttttgactgagccgattttcagcggcagcggattaaatgatgtctcaattcat
gtaaaggatcgatgggatactgggaaactcaccatagattttgattaccgcactgatttattttcacgtgaagaaatcaacatgatttgtgagcgcat
gattaccatgctggagaacgcgttaacgcatccagaacatacaattgatgaattaacactgatttctgatgcggagaaagaaaaagtcatttctaaa
tggaatgagacggcaaaatccgagaagctggtcagccttcaggacatgttcgaaaagcaggcagttcttacgccagaacgtatcgctctcatgt
gtgatgacattcaagtcaactatcgaaagctcaatgaagaggcaaaccgcctcgcgcgtctgttgatcgaaaaagggattggtccggagcaattt
gtcgctttggcgctgccgcgttcccctgagatggtggcttcaatgcttggtgtgctcaagactggtgcggcgtatctcccccttgatccggagtttc
cagccgaccgcatttcttacatgctggaggatgcgaaaccttcatgcatcataacgactgaggaaatagcagccagtctgcctgatgacctggct
gtacctgagcttgtgcttgatcaggctgttacacaggagattataaaacgctattcgccggaaaatcaggatgtatcggtttcgcttgaccatcctgc
gtatatcatctatacctcaggatcaacaggaagaccgaagggagtcgttgtgacacagaaaagcttaagcaattttctgctgtctatgcaggaggc
attttctctaggagaagaagacaggctgttggctgtgacgactgtcgcttttgatatttcagcattggagttatatcttccgctgattagcggagcgca
aatcgtgatcgcaaagaaagaaacgatccgtgagccgcaggcattagctcaaatgattgaaaatttcgatattaacattatgcaggcgacaccga
cactgtggcacgctttggtaacgagtgaacctgagaaacttcgggggcttagagtgcttgtaggaggcgaggcgctgccgagcggtcttttgca
ggaacttcaagaccttcattgttcagtcacgaacttatacggtcccactgaaacaacgatttggtctgccgcagcttttcttgaagaagggctgaag
ggcgttcctccgattgggaaaccgatttggaacacgcaggtgtatgtgcttgataatggattgcagccggtgccgccgggcgttgtcggagagc
tttatattgcaggaaccggcttggccagaggttatttccatcgtcctgatttaacggcggagcgcttcgttgcagatccatacggaccgccgggaa
ctcggatgtatcggaccggagaccaggcccgctggcgcgccgatgggtctttggattatatcgggcgggcggatcatcaaatcaaaattcgcg
gattccgaattgaacttggagaaattgatgccgtgcttgccaatcacccgcacattgaacaggccgcggttgtcgtacgggaagatcagccggg
agacaaacgattggcggcttatgtagtcgctgatgctgctattgatactgcagagcttcgtcgttatatgggggctagtcttcctgattatatggtacc
gtcggcgtttgtggagatggacgagctgccgttaacacctaatggcaagcttgaccggaaagcactgccggcaccagacttcagcacatctgtc
agtgatcgggccccgcggaacgagatggaagaaacaatcgcacaaatatggtctgaggttctcggcagaaagcaaattggcattcatgacgat
ttctttgcgctcggagggcattccttgaaggccatgaccgccgcgtcccgcatcaagaaagagctcgggattgatcttccagtgaagcttttgtttg
aagcgccgacgatcgccggcatttcagcgtatttgaaaaacgggggctctgatggcttgcaggatgtaacgataatgaatcaggatcaggagc
agatcattttcgcatttccgccggttctgggctatggccttatgtaccaaaatctgtccagccgcttgccgtcatacaagctatgcgcctttgattttatt
gaggaggaagaccggcttgaccgctatgcggatttgatccagaagctgcagccggaagggcctttaacattgtttggatattcagcgggatgca
gcctggcgtttgaagctgcgaaaaagcttgaggaacaaggccgtattgttcagcggatcatcatggtggattcctataaaaaacaaggtgtcagt
gatctggacggacgcacggttgaaagtgatgtcgaagcgttgatgaatgtcaatcgggacaatgaagcgctcaacagcgaagccgtcaaaca
cggcctcaagcaaaaaacacatgccttttactcatactacgtcaacctgatcagcacaggccaggtgaaagcagatattgatctgttgacttccgg
cgctgattttgacatgccggaatggcttgcatcatgggaagaagctacaacaggtgtttaccgtgtgaaaagaggcttcggaacacacgcagaa
atgctgcagggcgaaacgctagataggaatgcggagattttgctcgaatttcttaatacacaaaccgtaacggtttcataaatgaagtgatgaaag
gaggagacagccaatgagccaactcttcaaatcatttgatgcgtcggaaaaaacacagctcatctgttttccgtttgccggcggctattcggcgtc
gtttcgccctctccatgcttttttgcagggggagtgcgagatgctcgctgccgagccgccgggacacggcacgaatcaaacgtcagccattgag
gatctcgaagagctgacggatttgtacaagcaagaactgaaccttcgccctgatcggccgtttgtgctgttcggacacagtatgggcggaatgat
caccttcaggctggcgcaaaagcttgagcgtgaaggcatctttccgcaggcggttatcatttctgcaatccagccgcctcatattcagcggaaga
aagtgtcccacctgcctgatgatcagtttctcgatcatattatccaattaggcggaatgcccgcagagcttgttgaaaataaggaggtcatgtcctttt
tcctgccttctttccgatcagattaccgggctcttgaacaatttgagctttacgatctggcccagatccagtcgcctgttcatgtctttaacgggcttga
tgataaaaaatgcatacgagatgcggaagggtggaagaagtgggcaaaagacatcacattccatcaatttgacggcgggcacatgttcctgctg
tcacaaacggaagaagtcgcagaacggatttttgcgatcttgaatcagcatccgatcattcaaccgtgaagccgccccgcagggcgctccgca
ggccgcttccggaccactccggaagcggccgtgcggtcggaggatcc
ME-B0019

SEQ ID NO: 21

gaattcgcatgcatcgacaaaaatgtcatgaaagaatcgttgtaagacgctcttcgcaagggtgtctttttttgcctttttttcggtttttgcgcggt
acacatagtcatgtaaagattgtaaattgcattcagcaataaaaaaagattgaacgcagcagtttggtttaaaaatttttatttttctgtaaataatgt
ttagtggaaatgattgcggcatcccgcaaaaaatattgctgtaaataaactggaatctttcggcatcccgcatgaaacttttcacccatttttcgg
tgataaaaacatttttttcatttaaactgaacggtagaaagataaaaaatattgaaaacaatgaataaatagccaaaattggtttcttattagggtg
gggtcttgcggtctttatccgcttatgttaaacgccgcaatgctgactgacggcagcctgctttaatagcggccatctgttttttgattggaagca
ctgctttttaagtgtagtactttgggctatttcggctgttagttcataagaattaaaagctgatatggataagaaagagaaaatgcgttgcacatgt
tcactgcttataaagattaggggaggtatgacaatatggaaataactttttaccctttaacggatgcacaaaaacgaatttggtacacagaaaa
attttatcctcacacgagcatttcaaatcttgcggggattggtaagctggtttcagctgatgcgattgattatgtgcttgttgagcaggcgattcaa
gagtttattcgcagaaatgacgccatgcgccttcggttgcggctagatgaaaacggggagcctgttcaatatattagcgagtatcggcctgtt
gatataaaacatactgacactactgaagatccgaatgcgatagagtttatttcacaatggagccgggaggaaacgaagaaacctttgccgct
atacgattgtgatttgttccgtttttccttgttcaccataaaggaaaatgaagtgtggttttacgcaaatgttcatcacgtgatttctgatggtatctc
catgaatattctcgggaatgcgatcatgcacatttatttagaattagccagcggctcagagacaaaagaaggaatctcgcattcatttatcgatc
atgttttatctgaacaggaatatgctcaatcgaagcggtttgaaaaggacaaggcgttttggaacaaacaatttgaatcggtgcctgaacttgtt
tccttgaaacggaatgcatccgcagggggaagtttagatgctgagaggttctctaaagatgtgcctgaagcgcttcatcagcagattctgtcg
ttttgtgaggcgaataaagtcagtgttctttcggtatttcaatcgctgctcgccgcctatttgtacagggtcagcggccagaatgatgttgtgacg
ggaacatttatgggcaaccggacaaatgcgaaagagaagcagatgcttggcatgtttgtttctacggttccgcttcggacaaacattgacgg
cgggcaggcgttttcagaatttgtcaaagaccggatgaaggatctgatgaagacacttcgccaccaaaagtatccgtataatctcctaatcaa
cgatttgcgtgaaacaaagagctctctgaccaagctgttcacggtttctcttgaatatcaagtgatgcagtggcagaaagaagaggatcttgc
ctttttgactgagccgattttcagcggcagcggattaaatgatgtctcaattcatgtaaaggatcgatgggatactgggaaactcaccatagatt
ttgattaccgcactgatttattttcacgtgaagaaatcaacatgatttgtgagcgcatgattaccatgctggagaacgcgttaacgcatccagaa
catacaattgatgaattaacactgatttctgatgcggagaaagaaaaagtcatttctaaatggaatgagacggcaaaatccgagaagctggtc
agccttcaggacatgttcgaaaagcaggcagttcttacgccagaacgtatcgctctcatgtgtgatgacattcaagtcaactatcgaaagctc
aatgaagaggcaaaccgcctcgcgcgtctgttgatcgaaaaagggattggtccggagcaatttgtcgctttggcgctgccgcgttcccctga
gatggtggcttcaatgcttggtgtgctcaagactggtgcggcgtatctcccccttgatccggagtttccagccgaccgcatttcttacatgctg
gaggatgcgaaaccttcatgcatcataacgactgaggaaatagcagccagtctgcctgatgacctggctgtacctgagcttgtgcttgatca
ggctgttacacaggagattataaaacgctattcgccggaaaatcaggatgtatcggtttcgcttgaccatcctgcgtatatcatctatacctcag
gatcaacaggaagaccgaagggagtcgttgtgacacagaaaagcttaagcaattttctgctgtctatgcaggaggcattttctctaggagaa
gaagacaggctgttggctgtgacgactgtcgcttttgatatttcagcattggagttatatcttccgctgattagcggagcgcaaatcgtgatcgc
aaagaaagaaacgatccgtgagccgcaggcattagctcaaatgattgaaaatttcgatattaacattatgcaggcgacaccgacactgtggc
acgctttggtaacgagtgaacctgagaaacttcgggggcttagagtgcttgtaggaggcgaggcgctgccgagcggtcttttgcaggaact
tcaagaccttcattgttcagtcacgaacttatacggtcccactgaaacaacgatttggtctgccgcagcttttcttgaagaagggctgaagggc
gttcctccgattgggaaaccgatttggaacacgcaggtgtatgtgcttgataatggattgcagccggtgccgccgggcgttgtcggagagct
ttatattgcaggaaccggcttggccagaggttatttccatcgtcctgatttaacggcggagcgcttcgttgcagatccatacggaccgccggg
aactcggatgtatcggaccggagaccaggcccgctggcgcgccgatgggtctttggattatatcgggcgggcggatcatcaaatcaaaatt
cgcggattccgaattgaacttggagaaattgatgccgtgcttgccaatcacccgcacattgaacaggccgcggttgtcgtacgggaagatca
gccgggagacaaacgattggcggcttatgtagtcgctgatgctgctattgatactgcagagcttcgtcgttatatgggggctagtcttcctgatt
atatggtaccgtcggcgtttgtggagatggacgagctgccgttaacacctaatggcaagcttgaccggaaagcactgccggcaccagactt
cagcacatctgtcagtgatcgggccccgcggactcctcaggaagagatattggcacaaatatggtctgaggttctcggcagaaagcaaatt
ggcattcatgacgatttctttgcgctcggagggcattccttgaaggccatgaccgccgcgtcccgcatcaagaaagagctcgggattgatctt
ccagtgaagcttttgtttgaagcgccgacgatcgccggcatttcagcgtatttgaaaaacgggggctctgatggcttgcaggatgtaacgata
atgaatcaggatcaggagcagatcattttcgcatttccgccggttctgggctatggccttatgtaccaaaatctgtccagccgcttgccgtcata
caagctatgcgcctttgattttattgaggaggaagaccggcttgaccgctatgcggatttgatccagaagctgcagccggaagggcctttaac
attgtttggatattcagcgggatgcagcctggcgtttgaagctgcgaaaaagcttgaggaacaaggccgtattgttcagcggatcatcatggt
ggattcctataaaaaacaaggtgtcagtgatctggacggacgcacggttgaaagtgatgtcgaagcgttgatgaatgtcaatcgggacaatg
aagcgctcaacagcgaagccgtcaaacacggcctcaagcaaaaaacacatgccttttactcatactacgtcaacctgatcagcacaggcca
ggtgaaagcagatattgatctgttgacttccggcgctgattttgacatgccggaatggcttgcatcatgggaagaagctacaacaggtgtttac
cgtgtgaaaagaggcttcggaacacacgcagaaatgctgcagggcgaaacgctagatgggaatgcggagattttgctcgaatttcttaatac
acaaaccgtaacggtttcataaatgaagtgatgaaaggaggagacagccaatgagccaactcttcaaatcatttgatgcgtcggaaaaaaca
cagctcatctgttttccgtttgccggcggctattcggcgtcgtttcgccctctccatgcttttttgcagggggagtgcgagatgctcgctgccga
gccgccgggacacggcacgaatcaaacgtcagccattgaggatctcgaagagctgacggatttgtacaagcaagaactgaaccttcgccc
tgatcggccgtttgtgctgttcggacacagtatgggcggaatgatcaccttcaggctggcgcaaaagcttgagcgtgaaggcatctttccgc
aggcggttatcatttctgcaatccagccgcctcatattcagcggaagaaagtgtcccacctgcctgatgatcagtttctcgatcatattatccaat
taggcggaatgcccgcagagcttgttgaaaataaggaggtcatgtcctttttcctgccttctttccgatcagattaccgggctcttgaacaatttg
agctttacgatctggcccagatccagtcgcctgttcatgtctttaacgggcttgatgataaaaaatgcatacgagatgcggaagggtggaaga
agtgggcaaaagacatcacattccatcaatttgacggcgggcacatgttcctgctgtcacaaacggaagaagtcgcagaacggatttttgcg
atcttgaatcagcatccgatcattcaaccgtgaagccgccccgcagggcgctccgcaggccgcttccggaccactccggaagcggccgt
gcggtcggaggatcc
ME-B0020

SEQ ID NO: 22

gaattcgcatgcatcgacaaaaatgtcatgaaagaatcgttgtaagacgctcttcgcaagggtgtctttttttgcctttttttcggtttttgcgcggt
acacatagtcatgtaaagattgtaaattgcattcagcaataaaaaaagattgaacgcagcagtttggtttaaaaatttttatttttctgtaaataatgt
ttagtggaaatgattgcggcatcccgcaaaaaatattgctgtaaataaactggaatctttcggcatcccgcatgaaacttttcacccatttttcgg
tgataaaaacatttttttcatttaaactgaacggtagaaagataaaaaatattgaaaacaatgaataaatagccaaaattggtttcttattagggtg
gggtcttgcggtctttatccgcttatgttaaacgccgcaatgctgactgacggcagcctgctttaatagcggccatctgttttttgattggaagca
ctgctttttaagtgtagtactttgggctatttcggctgttagttcataagaattaaaagctgatatggataagaaagagaaaatgcgttgcacatgt
tcactgcttataaagattaggggaggtatgacaatatggaaataactttttaccctttaacggatgcacaaaaacgaatttggtacacagaaaa
attttatcctcacacgagcatttcaaatcttgcggggattggtaagctggtttcagctgatgcgattgattatgtgcttgttgagcaggcgattcaa
gagtttattcgcagaaatgacgccatgcgccttcggttgcggctagatgaaaacggggagcctgttcaatatattagcgagtatcggcctgtt
gatataaaacatactgacactactgaagatccgaatgcgatagagtttatttcacaatggagccgggaggaaacgaagaaacctttgccgct
atacgattgtgatttgttccgtttttccttgttcaccataaaggaaaatgaagtgtggttttacgcaaatgttcatcacgtgatttctgatggtatctc
catgaatattctcgggaatgcgatcatgcacatttatttagaattagccagcggctcagagacaaaagaaggaatctcgcattcatttatcgatc
atgttttatctgaacaggaatatgctcaatcgaagcggtttgaaaaggacaaggcgttttggaacaaacaatttgaatcggtgcctgaacttgtt
tccttgaaacggaatgcatccgcagggggaagtttagatgctgagaggttctctaaagatgtgcctgaagcgcttcatcagcagattctgtcg
ttttgtgaggcgaataaagtcagtgttctttcggtatttcaatcgctgctcgccgcctatttgtacagggtcagcggccagaatgatgttgtgacg
ggaacatttatgggcaaccggacaaatgcgaaagagaagcagatgcttggcatgtttgtttctacggttccgcttcggacaaacattgacgg
cgggcaggcgttttcagaatttgtcaaagaccggatgaaggatctgatgaagacacttcgccaccaaaagtatccgtataatctcctaatcaa
cgatttgcgtgaaacaaagagctctctgaccaagctgttcacggtttctcttgaatatcaagtgatgcagtggcagaaagaagaggatcttgc
ctttttgactgagccgattttcagcggcagcggattaaatgatgtctcaattcatgtaaaggatcgatgggatactgggaaactcaccatagatt
ttgattaccgcactgatttattttcacgtgaagaaatcaacatgatttgtgagcgcatgattaccatgctggagaacgcgttaacgcatccagaa
catacaattgatgaattaacactgctgttgccagaggagaaagaaaaagtcatttctaaatggaatgagacggcaaaatccgagaagctggt
cagccttcaggacatgttcgaaaagcaggcagttcttacgccagaacgtatcgctctcatgtgtgatgacattcaagtcaactatcgaaagct
caatgaagaggcaaaccgcctcgcgcgtctgttgatcgaaaaagggattggtccggagcaatttgtcgctttggcgctgccgcgttcccctg
agatggtggcttcaatgcttggtgtgctcaagactggtgcggcgtatctcccccttgatccggagtttccagccgaccgcatttcttacatgctg
gaggatgcgaaaccttcatgcatcataacgactgaggaaatagcagccagtctgcctgatgacctggctgtacctgagcttgtgcttgatca
ggctgttacacaggagattataaaacgctattcgccggaaaatcaggatgtatcggtttcgcttgaccatcctgcgtatatcatctatacctcag
gatcaacaggaagaccgaagggagtcgttgtgacacagaaaagcttaagcaattttctgctgtctatgcaggaggcattttctctaggagaa
gaagacaggctgttggctgtgacgactgtcgcttttgatatttcagcattggagttatatcttccgctgattagcggagcgcaaatcgtgatcgc
aaagaaagaaacgatccgtgagccgcaggcattagctcaaatgattgaaaatttcgatattaacattatgcaggcgacaccgacactgtggc
acgctttggtaacgagtgaacctgagaaacttcgggggcttagagtgcttgtaggaggcgaggcgctgccgagcggtcttttgcaggaact
tcaagaccttcattgttcagtcacgaacttatacggtcccactgaaacaacgatttggtctgccgcagcttttcttgaagaagggctgaagggc
gttcctccgattgggaaaccgatttggaacacgcaggtgtatgtgcttgataatggattgcagccggtgccgccgggcgttgtcggagagct
ttatattgcaggaaccggcttggccagaggttatttccatcgtcctgatttaacggcggagcgcttcgttgcagatccatacggaccgccggg
aactcggatgtatcggaccggagaccaggcccgctggcgcgccgatgggtctttggattatatcgggcgggcggatcatcaaatcaaaatt
cgcggattccgaattgaacttggagaaattgatgccgtgcttgccaatcacccgcacattgaacaggccgcggttgtcgtacgggaagatca
gccgggagacaaacgattggcggcttatgtagtcgctgatgctgctattgatactgcagagcttcgtcgttatatgggggctagtcttcctgatt
atatggtaccgtcggcgtttgtggagatggacgagctgccgttaacacctaatggcaagcttgaccggaaagcactgccggcaccagactt
cagcacatctgtcagtgatcgggccccgcggactcctcaggaagagatattgtgtgacttgtttgcagaggttctcggtttggcacgcgtcgg
tattcatgacgatttctttgcgctcggagggcattccttgaaggccatgaccgccgcgtcccgcatcaagaaagagctcgggattgatcttcc
agtgaagcttttgtttgaagcgccgacgatcgccggcatttcagcgtatttgaaaaacgggggctctgatggcttgcaggatgtaacgataat
gaatcaggatcaggagcagatcattttcgcatttccgccggttctgggctatggccttatgtaccaaaatctgtccagccgcttgccgtcatac
aagctatgcgcctttgattttattgaggaggaagaccggcttgaccgctatgcggatttgatccagaagctgcagccggaagggcctttaaca
ttgtttggatattcagcgggatgcagcctggcgtttgaagctgcgaaaaagcttgaggaacaaggccgtattgttcagcggatcatcatggtg
gattcctataaaaaacaaggtgtcagtgatctggacggacgcacggttgaaagtgatgtcgaagcgttgatgaatgtcaatcgggacaatga
agcgctcaacagcgaagccgtcaaacacggcctcaagcaaaaaacacatgccttttactcatactacgtcaacctgatcagcacaggccag
gtgaaagcagatattgatctgttgacttccggcgctgattttgacatgccggaatggcttgcatcatgggaagaagctacaacaggtgtttacc
gtgtgaaaagaggcttcggaacacacgcagaaatgctgcagggcgaaacgctagataggaatgcggagattttgctcgaatttcttaataca
caaaccgtaacggtttcataaatgaagtgatgaaaggaggagacagccaatgagccaactcttcaaatcatttgatgcgtcggaaaaaacac
agctcatctgttttccgtttgccggcggctattcggcgtcgtttcgccctctccatgcttttttgcagggggagtgcgagatgctcgctgccgag
ccgccgggacacggcacgaatcaaacgtcagccattgaggatctcgaagagctgacggatttgtacaagcaagaactgaaccttcgccct
gatcggccgtttgtgctgttcggacacagtatgggcggaatgatcaccttcaggctggcgcaaaagcttgagcgtgaaggcatctttccgca
ggcggttatcatttctgcaatccagccgcctcatattcagcggaagaaagtgtcccacctgcctgatgatcagtttctcgatcatattatccaatt
aggcggaatgcccgcagagcttgttgaaaataaggaggtcatgtcctttttcctgccttctttccgatcagattaccgggctcttgaacaatttg
agctttacgatctggcccagatccagtcgcctgttcatgtctttaacgggcttgatgataaaaaatgcatacgagatgcggaagggtggaaga
agtgggcaaaagacatcacattccatcaatttgacggcgggcacatgttcctgctgtcacaaacggaagaagtcgcagaacggatttttgcg
atcttgaatcagcatccgatcattcaaccgtgaagccgccccgcagggcgctccgcaggccgcttccggaccactccggaagcggccgt
gcggtcggaggatcc
ME-B0021

SEQ ID NO: 23

gaattcgcatgcatcgacaaaaatgtcatgaaagaatcgttgtaagacgctcttcgcaagggtgtctttttttgcctttttttcggtttttgcgcggt
acacatagtcatgtaaagattgtaaattgcattcagcaataaaaaaagattgaacgcagcagtttggtttaaaaatttttatttttctgtaaataatgt
ttagtggaaatgattgcggcatcccgcaaaaaatattgctgtaaataaactggaatctttcggcatcccgcatgaaacttttcacccatttttcgg
tgataaaaacatttttttcatttaaactgaacggtagaaagataaaaaatattgaaaacaatgaataaatagccaaaattggtttcttattagggtg
gggtcttgcggtctttatccgcttatgttaaacgccgcaatgctgactgacggcagcctgctttaatagcggccatctgttttttgattggaagca
ctgctttttaagtgtagtactttgggctatttcggctgttagttcataagaattaaaagctgatatggataagaaagagaaaatgcgttgcacatgt
tcactgcttataaagattaggggaggtatgacaatatggaaataactttttaccctttaacggatgcacaaaaacgaatttggtacacagaaaa
attttatcctcacacgagcatttcaaatcttgcggggattggtaagctggtttcagctgatgcgattgattatgtgcttgttgagcaggcgattcaa
gagtttattcgcagaaatgacgccatgcgccttcggttgcggctagatgaaaacggggagcctgttcaatatattagcgagtatcggcctgtt
gatataaaacatactgacactactgaagatccgaatgcgatagagtttatttcacaatggagccgggaggaaacgaagaaacctttgccgct
atacgattgtgatttgttccgtttttccttgttcaccataaaggaaaatgaagtgtggttttacgcaaatgttcatcacgtgatttctgatggtatctc
catgaatattctcgggaatgcgatcatgcacatttatttagaattagccagcggctcagagacaaaagaaggaatctcgcattcatttatcgatc
atgttttatctgaacaggaatatgctcaatcgaagcggtttgaaaaggacaaggcgttttggaacaaacaatttgaatcggtgcctgaacttgtt
tccttgaaacggaatgcatccgcagggggaagtttagatgctgagaggttctctaaagatgtgcctgaagcgcttcatcagcagattctgtcg
ttttgtgaggcgaataaagtcagtgttctttcggtatttcaatcgctgctcgccgcctatttgtacagggtcagcggccagaatgatgttgtgacg
ggaacatttatgggcaaccggacaaatgcgaaagagaagcagatgcttggcatgtttgtttctacggttccgcttcggacaaacattgacgg
cgggcaggcgttttcagaatttgtcaaagaccggatgaaggatctgatgaagacacttcgccaccaaaagtatccgtataatctcctaatcaa
cgatttgcgtgaaacaaagagctctctgaccaagctgttcacggtttctcttgaatatcaagtgatgcagtggcagaaagaagaggatcttgc
ctttttgactgagccgattttcagcggcagcggattaaatgatgtctcaattcatgtaaaggatcgatgggatactgggaaactcaccatagatt
ttgattaccgcactgatttattttcacgtgaagaaatcaacatgatttgtgagcgcatgattaccatgctggagaacgcgttaacgcatccagaa
catacaattgatgaattaacactgatttctgatgcggagaaagaaaaagtcatttctaaatggaatgagacggcaaaatccgagaagctggtc
agccttcaggacatgttcgaaaagcaggcagttcttacgccagaacgtatcgctctcatgtgtgatgacattcaagtcaactatcgaaagctc
aatgaagaggcaaaccgcctcgcgcgtctgttgatcgaaaaagggattggtccggagcaatttgtcgctttggcgctgccgcgttcccctga
gatggtggcttcaatgcttggtgtgctcaagactggtgcggcgtatctcccccttgatccggagtttccagccgaccgcatttcttacatgctg
gaggatgcgaaaccttcatgcatcataacgactgaggaaatagcagccagtctgcctgatgacctggctgtacctgagcttgtgcttgatca
ggctgttacacaggagattataaaacgctattcgccggaaaatcaggatgtatcggtttcgcttgaccatcctgcgtatatcatctatacctcag
gatcaacaggaagaccgaagggagtcgttgtgacacagaaaagcttaagcaattttctgctgtctatgcaggaggcattttctctaggagaa
gaagacaggctgttggctgtgacgactgtcgcttttgatatttcagcattggagttatatcttccgctgattagcggagcgcaaatcgtgatcgc
aaagaaagaaacgatccgtgagccgcaggcattagctcaaatgattgaaaatttcgatattaacattatgcaggcgacaccgacactgtggc
acgctttggtaacgagtgaacctgagaaacttcgggggcttagagtgcttgtaggaggcgaggcgctgccgagcggtcttttgcaggaact.
tcaagaccttcattgttcagtcacgaacttatacggtcccactgaaacaacgatttggtctgccgcagcttttcttgaagaagggctgaagggc
gttcctccgattgggaaaccgatttggaacacgcaggtgtatgtgcttgataatggattgcagccggtgccgccgggcgttgtcggagagct
ttatattgcaggaaccggcttggccagaggttatttccatcgtcctgatttaacggcggagcgcttcgttgcagatccatacggaccgccggg
aactcggatgtatcggaccggagaccaggcccgctggcgcgccgatgggtctttggattatatcgggcgggcggatcatcaaatcaaaatt
cgcggattccgaattgaacttggagaaattgatgccgtgcttgccaatcacccgcacattgaacaggccgcggttgtcgtacgggaagatca
gccgggagacaaacgattggcggcttatgtagtcgctgatgctgctattgatactgcagagcttcgtcgttatatgggggctagtcttcctgatt
atatggtaccgtcggcgtttgtggagatggacgagctgccgttaacacctaatggcaagcttgaccggaaagcactgccggcaccagactt
cagcacatctgtcagtgatcgggccccgcggactcctcaggaagagatattgtgtgacttgtttgcagaggttctcggtttggcacgcgtcgg
tattcatgacgatttctttgcgctcggagggcattccttgaaggccatgaccgccgcgtcccgcatcaagaaagagctcgggattgatcttcc
agtgaagcttttgtttgaagcgccgacgatcgccggcatttcagcgtatttgaaaaacgggggctctgatggcttgcaggatgtaacgataat
gaatcaggatcaggagcagatcattttcgcatttccgccggttctgggctatggccttatgtaccaaaatctgtccagccgcttgccgtcatac
aagctatgcgcctttgattttattgaggaggaagaccggcttgaccgctatgcggatttgatccagaagctgcagccggaagggcctttaaca
ttgtttggatattcagcgggatgcagcctggcgtttgaagctgcgaaaaagcttgaggaacaaggccgtattgttcagcggatcatcatggtg
gattcctataaaaaacaaggtgtcagtgatctggacggacgcacggttgaaagtgatgtcgaagcgttgatgaatgtcaatcgggacaatga
agcgctcaacagcgaagccgtcaaacacggcctcaagcaaaaaacacatgccttttactcatactacgtcaacctgatcagcacaggccag
gtgaaagcagatattgatctgttgacttccggcgctgattttgacatgccggaatggcttgcatcatgggaagaagctacaacaggtgtttacc
gtgtgaaaagaggcttcggaacacacgcagaaatgctgcagggcgaaacgctagataggaatgcggagattttgctcgaatttcttaataca
caaaccgtaacggtttcataaatgaagtgatgaaaggaggagacagccaatgagccaactcttcaaatcatttgatgcgtcggaaaaaacac
agctcatctgttttccgtttgccggcggctattcggcgtcgtttcgccctctccatgcttttttgcagggggagtgcgagatgctcgctgccgag
ccgccgggacacggcacgaatcaaacgtcagccattgaggatctcgaagagctgacggatttgtacaagcaagaactgaaccttcgccct
gatcggccgtttgtgctgttcggacacagtatgggcggaatgatcaccttcaggctggcgcaaaagcttgagcgtgaaggcatctttccgca
ggcggttatcatttctgcaatccagccgcctcatattcagcggaagaaagtgtcccacctgcctgatgatcagtttctcgatcatattatccaatt
aggcggaatgcccgcagagcttgttgaaaataaggaggtcatgtcctttttcctgccttctttccgatcagattaccgggctcttgaacaatttg
agctttacgatctggcccagatccagtcgcctgttcatgtctttaacgggcttgatgataaaaaatgcatacgagatgcggaagggtggaaga
agtgggcaaaagacatcacattccatcaatttgacggcgggcacatgttcctgctgtcacaaacggaagaagtcgcagaacggatttttgcg
atcttgaatcagcatccgatcattcaaccgtgaagccgccccgcagggcgctccgcaggccgcttccggaccactccggaagcggccgt
gcggtcggaggatcc
ME-B0021

SEQ ID NO: 24

gaattcgcatgcatcgacaaaaatgtcatgaaagaatcgttgtaagacgctcttcgcaagggtgtctttttttgcctttttttcggtttttgcgcggt
acacatagtcatgtaaagattgtaaattgcattcagcaataaaaaaagattgaacgcagcagtttggtttaaaaatttttatttttctgtaaataatgt
ttagtggaaatgattgcggcatcccgcaaaaaatattgctgtaaataaactggaatctttcggcatcccgcatgaaacttttcacccatttttcgg
tgataaaaacatttttttcatttaaactgaacggtagaaagataaaaaatattgaaaacaatgaataaatagccaaaattggtttcttattagggtg
gggtcttgcggtctttatccgcttatgttaaacgccgcaatgctgactgacggcagcctgctttaatagcggccatctgttttttgattggaagca
ctgctttttaagtgtagtactttgggctatttcggctgttagttcataagaattaaaagctgatatggataagaaagagaaaatgcgttgcacatgt
tcactgcttataaagattaggggaggtatgacaatatggaaataactttttaccctttaacggatgcacaaaaacgaatttggtacacagaaaa
attttatcctcacacgagcatttcaaatcttgcggggattggtaagctggtttcagctgatgcgattgattatgtgcttgttgagcaggcgattcaa
gagtttattcgcagaaatgacgccatgcgccttcggttgcggctagatgaaaacggggagcctgttcaatatattagcgagtatcggcctgtt
gatataaaacatactgacactactgaagatccgaatgcgatagagtttatttcacaatggagccgggaggaaacgaagaaacctttgccgct
atacgattgtgatttgttccgtttttccttgttcaccataaaggaaaatgaagtgtggttttacgcaaatgttcatcacgtgatttctgatggtatctc
catgaatattctcgggaatgcgatcatgcacatttatttagaattagccagcggctcagagacaaaagaaggaatctcgcattcatttatcgatc
atgttttatctgaacaggaatatgctcaatcgaagcggtttgaaaaggacaaggcgttttggaacaaacaatttgaatcggtgcctgaacttgtt
tccttgaaacggaatgcatccgcagggggaagtttagatgctgagaggttctctaaagatgtgcctgaagcgcttcatcagcagattctgtcg
ttttgtgaggcgaataaagtcagtgttctttcggtatttcaatcgctgctcgccgcctatttgtacagggtcagcggccagaatgatgttgtgacg
ggaacatttatgggcaaccggacaaatgcgaaagagaagcagatgcttggcatgtttgtttctacggttccgcttcggacaaacattgacgg
cgggcaggcgttttcagaatttgtcaaagaccggatgaaggatctgatgaagacacttcgccaccaaaagtatccgtataatctcctaatcaa
cgatttgcgtgaaacaaagagctctctgaccaagctgttcacggtttctcttgaatatcaagtgatgcagtggcagaaagaagaggatcttgc
ctttttgactgagccgattttcagcggcagcggattaaatgatgtctcaattcatgtaaaggatcgatgggatactgggaaactcaccatagatt
ttgattaccgcactgatttattttcacgtgaagaaatcaacatgatttgtgagcgcatgattaccatgctggagaacgcgttaacgcatccagaa
catacaattgatgaattaacactgatttctgatgcggagaaagaaaaagtcatttctaaatggaatgagacggcaaaatccgagaagctggtc
agccttcaggacatgttcgaaaagcaggcagttcttacgccagaacgtatcgctctcatgtgtgatgacattcaagtcaactatcgaaagctc
aatgaagaggcaaaccgcctcgcgcgtctgttgatcgaaaaagggattggtccggagcaatttgtcgctttggcgctgccgcgttcccctga
gatggtggcttcaatgcttggtgtgctcaagactggtgcggcgtatctcccccttgatccggagtttccagccgaccgcatttcttacatgctg
gaggatgcgaaaccttcatgcatcataacgactgaggaaatagcagccagtctgcctgatgacctggctgtacctgagcttgtgcttgatca
ggctgttacacaggagattataaaacgctattcgccggaaaatcaggatgtatcggtttcgcttgaccatcctgcgtatatcatctatacctcag
gatcaacaggaagaccgaagggagtcgttgtgacacagaaaagcttaagcaattttctgctgtctatgcaggaggcattttctctaggagaa
gaagacaggctgttggctgtgacgactgtcgcttttgatatttcagcattggagttatatcttccgctgattagcggagcgcaaatcgtgatcgc
aaagaaagaaacgatccgtgagccgcaggcattagctcaaatgattgaaaatttcgatattaacattatgcaggcgacaccgacactgtggc
acgctttggtaacgagtgaacctgagaaacttcgggggcttagagtgcttgtaggaggcgaggcgctgccgagcggtcttttgcaggaact
tcaagaccttcattgttcagtcacgaacttatacggtcccactgaaacaacgatttggtctgccgcagcttttcttgaagaagggctgaagggc
gttcctccgattgggaaaccgatttggaacacgcaggtgtatgtgcttgataatggattgcagccggtgccgccgggcgttgtcggagagct
ttatattgcaggaaccggcttggccagaggttatttccatcgtcctgatttaacggcggagcgcttcgttgcagatccatacggaccgccggg
aactcggatgtatcggaccggagaccaggcccgctggcgcgccgatgggtctttggattatatcgggcgggcggatcatcaaatcaaaatt
cgcggattccgaattgaacttggagaaattgatgccgtgcttgccaatcacccgcacattgaacaggccgcggttgtcgtacgggaagatca
gccgggagacaaacgattggcggcttatgtagtcgctgatgctgctattgatactgcagagcttcgtcgttatatgggggctagtcttcctgatt
atatggtaccgtcggcgtttgtggagatggacgagctgccgttaacacctaatggcaagcttgaccggaaagcactgccggcaccagactt
cagcacatctgtcagtgatcgggccccgcggactcctcaggaagagatattggcacaaatatggtctgaggttctcggcagaaagcaaatt
ggcattcatgacgatttctttgcgctcggagggcattccttgaaggccatgaccgccgcgtcccgcatcaagaaagagctcgggattgatctt
ccagtgaagcttttgtttgaagcgccgacgatcgccggcatttcagcgtatttgaaaaacgggggctctgatggcttgcaggatgtaacgata
atgaatcaggatcaggagcagatcattttcgcatttccgccggttctgggctatggccttatgtaccaaaatctgtccagccgcttgccgtcata
caagctatgcgcctttgattttattgaggaggaagaccggcttgaccgctatgcggatttgatccagaagctgcagccggaagggcctttaac
attgtttggatattcagcgggatgcagcctggcgtttgaagctgcgaaaaagcttgaggaacaaggccgtattgttcagcggatcatcatggt
ggattcctataaaaaacaaggtgtcagtgatctggacggacgcacggttgaaagtgatgtcgaagcgttgatgaatgtcaatcgggacaatg
aagcgctcaacagcgaagccgtcaaacacggcctcaagcaaaaaacacatgccttttactcatactacgtcaacctgatcagcacaggcca
ggtgaaagcagatattgatctgttgacttccggcgctgattttgacatgccggaatggcttgcatcatgggaagaagctacaacaggtgtttac
cgtgtgaaaagaggcttcggaacacacgcagaaatgctgcagggcgaaacgctagataggaatgcggagattttgctcgaatttcttaatac
acaaaccgtaacggtttcataaatgaagtgatgaaaggaggagacagccaatgagccaactcttcaaatcatttgatgcgtcggaaaaaaca
cagctcatctgttttccgtttgccggcggctattcggcgtcgtttcgccctctccatgcttttttgcagggggagtgcgagatgctcgctgccga
gccgccgggacacggcacgaatcaaacgtcagccattgaggatctcgaagagctgacggatttgtacaagcaagaactgaaccttcgccc
tgatcggccgtttgtgctgttcggacacagtatgggcggaatgatcaccttcaggctggcgcaaaagcttgagcgtgaaggcatctttccgc
aggcggttatcatttctgcaatccagccgcctcatattcagcggaagaaagtgtcccacctgcctgatgatcagtttctcgatcatattatccaat
taggcggaatgcccgcagagcttgttgaaaataaggaggtcatgtcctttttcctgccttctttccgatcagattaccgggctcttgaacaatttg
agctttacgatctggcccagatccagtcgcctgttcatgtctttaacgggcttgatgataaaaaatgcatacgagatgcggaagggtggaaga
agtgggcaaaagacatcacattccatcaatttgacggcgggcacatgttcctgctgtcacaaacggaagaagtcgcagaacggatttttgcg
atcttgaatcagcatccgatcattcaaccgtgaagccgccccgcagggcgctccgcaggccgcttccggaccactccggaagcggccgt
gcggtcggaggatcc
ME-B0023

SEQ ID NO: 25

gaattcgcatgcatcgacaaaaatgtcatgaaagaatcgttgtaagacgctcttcgcaagggtgtctttttttgcctttttttcggtttttgcgcggt
acacatagtcatgtaaagattgtaaattgcattcagcaataaaaaaagattgaacgcagcagtttggtttaaaaatttttatttttctgtaaataatgt
ttagtggaaatgattgcggcatcccgcaaaaaatattgctgtaaataaactggaatctttcggcatcccgcatgaaacttttcacccatttttcgg
tgataaaaacatttttttcatttaaactgaacggtagaaagataaaaaatattgaaaacaatgaataaatagccaaaattggtttcttattagggtg
gggtcttgcggtctttatccgcttatgttaaacgccgcaatgctgactgacggcagcctgctttaatagcggccatctgttttttgattggaagca
ctgctttttaagtgtagtactttgggctatttcggctgttagttcataagaattaaaagctgatatggataagaaagagaaaatgcgttgcacatgt
tcactgcttataaagattaggggaggtatgacaatatggaaataactttttaccctttaacggatgcacaaaaacgaatttggtacacagaaaa
attttatcctcacacgagcatttcaaatcttgcggggattggtaagctggtttcagctgatgcgattgattatgtgcttgttgagcaggcgattcaa
gagtttattcgcagaaatgacgccatgcgccttcggttgcggctagatgaaaacggggagcctgttcaatatattagcgagtatcggcctgtt
gatataaaacatactgacactactgaagatccgaatgcgatagagtttatttcacaatggagccgggaggaaacgaagaaacctttgccgct
atacgattgtgatttgttccgtttttccttgttcaccataaaggaaaatgaagtgtggttttacgcaaatgttcatcacgtgatttctgatggtatctc
catgaatattctcgggaatgcgatcatgcacatttatttagaattagccagcggctcagagacaaaagaaggaatctcgcattcatttatcgatc
atgttttatctgaacaggaatatgctcaatcgaagcggtttgaaaaggacaaggcgttttggaacaaacaatttgaatcggtgcctgaacttgtt
tccttgaaacggaatgcatccgcagggggaagtttagatgctgagaggttctctaaagatgtgcctgaagcgcttcatcagcagattctgtcg
ttttgtgaggcgaataaagtcagtgttctttcggtatttcaatcgctgctcgccgcctatttgtacagggtcagcggccagaatgatgttgtgacg
ggaacatttatgggcaaccggacaaatgcgaaagagaagcagatgcttggcatgtttgtttctacggttccgcttcggacaaacattgacgg
cgggcaggcgttttcagaatttgtcaaagaccggatgaaggatctgatgaagacacttcgccaccaaaagtatccgtataatctcctaatcaa
cgatttgcgtgaaacaaagagctctctgaccaagctgttcacggtttctcttgaatatcaagtgatgcagtggcagaaagaagaggatcttgc
ctttttgactgagccgattttcagcggcagcggattaaatgatgtctcaattcatgtaaaggatcgatgggatactgggaaactcaccatagatt
ttgattaccgcactgatttattttcacgtgaagaaatcaacatgatttgtgagcgcatgattaccatgctggagaacgcgttaacgcatccagaa
catacaattgatgaattaacactgctgttgccagaggagaaagaaaaagtcatttctaaatggaatgagacggcaaaatccgagaagctggt
cagccttcaggacatgttcgaaaagcaggcagttcttacgccagaacgtatcgctctcatgtgtgatgacattcaagtcaactatcgaaagct
caatgaagaggcaaaccgcctcgcgcgtctgttgatcgaaaaagggattggtccggagcaatttgtcgctttggcgctgccgcgttcccctg
agatggtggcttcaatgcttggtgtgctcaagactggtgcggcgtatctcccccttgatccggagtttccagccgaccgcatttcttacatgctg
gaggatgcgaaaccttcatgcatcataacgactgaggaaatagcagccagtctgcctgatgacctggctgtacctgagcttgtgcttgatca
ggctgttacacaggagattataaaacgctattcgccggaaaatcaggatgtatcggtttcgcttgaccatcctgcgtatatcatctatacctcag
gatcaacaggaagaccgaagggagtcgttgtgacacagaaaagcttaagcaattttctgctgtctatgcaggaggcattttctctaggagaa
gaagacaggctgttggctgtgacgactgtcgcttttgatatttcagcattggagttatatcttccgctgattagcggagcgcaaatcgtgatcgc
aaagaaagaaacgatccgtgagccgcaggcattagctcaaatgattgaaaatttcgatattaacattatgcaggcgacaccgacactgtggc
acgctttggtaacgagtgaacctgagaaacttcgggggcttagagtgcttgtaggaggcgaggcgctgccgagcggtcttttgcaggaact
tcaagaccttcattgttcagtcacgaacttatacggtcccactgaaacaacgatttggtctgccgcagcttttcttgaagaagggctgaagggc
gttcctccgattgggaaaccgatttggaacacgcaggtgtatgtgcttgataatggattgcagccggtgccgccgggcgttgtcggagagct
ttatattgcaggaaccggcttggccagaggttatttccatcgtcctgatttaacggcggagcgcttcgttgcagatccatacggaccgccggg
aactcggatgtatcggaccggagaccaggcccgctggcgcgccgatgggtctttggattatatcgggcgggcggatcatcaaatcaaaatt
cgcggattccgaattgaacttggagaaattgatgccgtgcttgccaatcacccgcacattgaacaggccgcggttgtcgtacgggaagatca
gccgggagacaaacgattggcggcttatgtagtcgctgatgctgctattgatactgcagagcttcgtcgttatatgggggctagtcttcctgatt
atatggtaccgtcggcgtttgtggagatggacgagctgccgttaacacctaatggcaagcttgaccggaaagcactgccggcaccagactt
cagcacatctgtcagtgatcgggccccgcggactcctcaggaagagatattgtgtgacttgtttgcagaggttctcggtttggcacgcgtcgg
tattcatgacgatttctttgcgctcggagggcattccttgaaggccatgaccgccgcgtcccgcatcaagaaagagctcgggattgatcttcc
agtgaagcttttgtttgaagcgccgacgatcgccggcatttcagcgtatttgaaaaacgggggctctgatggcttgcaggatgtaacgataat
gaatcaggatcaggagcagatcattttcgcatttccgccggttctgggctatggccttatgtaccaaaatctgtccagccgcttgccgtcatac
aagctatgcgcctttgattttattgaggaggaagaccggcttgaccgctatgcggatttgatccagaagctgcagccggaagggcctttaaca
ttgtttggatattcagcgggatgcagcctggcgtttgaagctgcgaaaaagcttgaggaacaaggccgtattgttcagcggatcatcatggtg
gattcctataaaaaacaaggtgtcagtgatctggacggacgcacggttgaaagtgatgtcgaagcgttgatgaatgtcaatcgggacaatga
agcgctcaacagcgaagccgtcaaacacggcctcaagcaaaaaacacatgccttttactcatactacgtcaacctgatcagcacaggccag
gtgaaagcagatattgatctgttgacttccggcgctgattttgacatgccggaatggcttgcatcatgggaagaagctacaacaggtgtttacc
gtgtgaaaagaggcttcggaacacacgcagaaatgctgcagggcgaaacgctagataggaatgcggagattttgctcgaatttcttaataca
caaaccgtaacggtttcataaatgaagtgatgaaaggaggagacagccaatgagccaactcttcaaatcatttgatgcgtcggaaaaaacac
agctcatctgttttccgtttgccggcggctattcggcgtcgtttcgccctctccatgcttttttgcagggggagtgcgagatgctcgctgccgag
ccgccgggacacggcacgaatcaaacgtcagccattgaggatctcgaagagctgacggatttgtacaagcaagaactgaaccttcgccct
gatcggccgtttgtgctgttcggacacagtatgggcggaatgatcaccttcaggctggcgcaaaagcttgagcgtgaaggcatctttccgca
ggcggttatcatttctgcaatccagccgcctcatattcagcggaagaaagtgtcccacctgcctgatgatcagtttctcgatcatattatccaatt
aggcggaatgcccgcagagcttgttgaaaataaggaggtcatgtcctttttcctgccttctttccgatcagattaccgggctcttgaacaatttg
agctttacgatctggcccagatccagtcgcctgttcatgtctttaacgggcttgatgataaaaaatgcatacgagatgcggaagggtggaaga
agtgggcaaaagacatcacattccatcaatttgacggcgggcacatgttcctgctgtcacaaacggaagaagtcgcagaacggatttttgcg
atcttgaatcagcatccgatcattcaaccgtgaagccgccccgcagggcgctccgcaggccgcttccggaccactccggaagcggccgt
gcggtcggaggatcc
ME-B0024

SEQ ID NO: 26

gaattcgcatgcatcgacaaaaatgtcatgaaagaatcgttgtaagacgctcttcgcaagggtgtctttttttgcctttttttcggtttttgcgcggt
acacatagtcatgtaaagattgtaaattgcattcagcaataaaaaaagattgaacgcagcagtttggtttaaaaatttttatttttctgtaaataatgt
ttagtggaaatgattgcggcatcccgcaaaaaatattgctgtaaataaactggaatctttcggcatcccgcatgaaacttttcacccatttttcgg
tgataaaaacatttttttcatttaaactgaacggtagaaagataaaaaatattgaaaacaatgaataaatagccaaaattggtttcttattagggtg
gggtcttgcggtctttatccgcttatgttaaacgccgcaatgctgactgacggcagcctgctttaatagcggccatctgttttttgattggaagca
ctgctttttaagtgtagtactttgggctatttcggctgttagttcataagaattaaaagctgatatggataagaaagagaaaatgcgttgcacatgt
tcactgcttataaagattaggggaggtatgacaatatggaaataactttttaccctttaacggatgcacaaaaacgaatttggtacacagaaaa
attttatcctcacacgagcatttcaaatcttgcggggattggtaagctggtttcagctgatgcgattgattatgtgcttgttgagcaggcgattcaa
gagtttattcgcagaaatgacgccatgcgccttcggttgcggctagatgaaaacggggagcctgttcaatatattagcgagtatcggcctgtt
gatataaaacatactgacactactgaagatccgaatgcgatagagtttatttcacaatggagccgggaggaaacgaagaaacctttgccgct
atacgattgtgatttgttccgtttttccttgttcaccataaaggaaaatgaagtgtggttttacgcaaatgttcatcacgtgatttctgatggtatctc
catgaatattctcgggaatgcgatcatgcacatttatttagaattagccagcggctcagagacaaaagaaggaatctcgcattcatttatcgatc
atgttttatctgaacaggaatatgctcaatcgaagcggtttgaaaaggacaaggcgttttggaacaaacaatttgaatcggtgcctgaacttgtt
tccttgaaacggaatgcatccgcagggggaagtttagatgctgagaggttctctaaagatgtgcctgaagcgcttcatcagcagattctgtcg
ttttgtgaggcgaataaagtcagtgttctttcggtatttcaatcgctgctcgccgcctatttgtacagggtcagcggccagaatgatgttgtgacg
ggaacatttatgggcaaccggacaaatgcgaaagagaagcagatgcttggcatgtttgtttctacggttccgcttcggacaaacattgacgg
cgggcaggcgttttcagaatttgtcaaagaccggatgaaggatctgatgaagacacttcgccaccaaaagtatccgtataatctcctaatcaa
cgatttgcgtgaaacaaagagctctctgaccaagctgttcacggtttctcttgaatatcaagtgatgcagtggcagaaagaagaggatcttgc
ctttttgactgagccgattttcagcggcagcggattaaatgatgtctcaattcatgtaaaggatcgatgggatactgggaaactcaccatagatt
ttgattaccgcactgatttattttcacgtgaagaaatcaacatgatttgtgagcgcatgattaccatgctggagaacgcgttaacgcatccagaa
catacaattgatgaattaacactgatttctgatgcggagaaagaaaaagtcatttctaaatggaatgagacggcaaaatccgagaagctggtc
agccttcaggacatgttcgaaaagcaggcagttcttacgccagaacgtatcgctctcatgtgtgatgacattcaagtcaactatcgaaagctc
aatgaagaggcaaaccgcctcgcgcgtctgttgatcgaaaaagggattggtccggagcaatttgtcgctttggcgctgccgcgttcccctga
gatggtggcttcaatgcttggtgtgctcaagactggtgcggcgtatctcccccttgatccggagtttccagccgaccgcatttcttacatgctg
gaggatgcgaaaccttcatgcatcataacgactgaggaaatagcagccagtctgcctgatgacctggctgtacctgagcttgtgcttgatca
ggctgttacacaggagattataaaacgctattcgccggaaaatcaggatgtatcggtttcgcttgaccatcctgcgtatatcatctatacctcag
gatcaacaggaagaccgaagggagtcgttgtgacacagaaaagcttaagcaattttctgctgtctatgcaggaggcattttctctaggagaa
gaagacaggctgttggctgtgacgactgtcgcttttgatatttcagcattggagttatatcttccgctgattagcggagcgcaaatcgtgatcgc
aaagaaagaaacgatccgtgagccgcaggcattagctcaaatgattgaaaatttcgatattaacattatgcaggcgacaccgacactgtggc
acgctttggtaacgagtgaacctgagaaacttcgggggcttagagtgcttgtaggaggcgaggcgctgccgagcggtcttttgcaggaact
tcaagaccttcattgttcagtcacgaacttatacggtcccactgaaacaacgatttggtctgccgcagcttttcttgaagaagggctgaagggc
gttcctccgattgggaaaccgatttggaacacgcaggtgtatgtgcttgataatggattgcagccggtgccgccgggcgttgtcggagagct
ttatattgcaggaaccggcttggccagaggttatttccatcgtcctgatttaacggcggagcgcttcgttgcagatccatacggaccgccggg
aactcggatgtatcggaccggagaccaggcccgctggcgcgccgatgggtctttggattatatcgggcgggcggatcatcaaatcaaaatt
cgcggattccgaattgaacttggagaaattgatgccgtgcttgccaatcacccgcacattgaacaggccgcggttgtcgtacgggaagatca
gccgggagacaaacgattggcggcttatgtagtcgctgatgctgctattgatactgcagagcttcgtcgttatatgggggctagtcttcctgatt
atatggtaccgtcggcgtttgtggagatggacgagctgccgttaacacctaatggcaagcttgaccggaaagcactgccggcaccagactt
cagcacatctgtcagtgatcgggccccgcggactcctcaggaagagatattgtgtgacttgtttgcagaggttctcggtttggcacgcgtcgg
tattcatgacgatttctttgcgctcggagggcattccttgaaggccatgaccgccgcgtcccgcatcaagaaagagctcgggattgatcttcc
agtgaagcttttgtttgaagcgccgacgatcgccggcatttcagcgtatttgaaaaacgggggctctgatggcttgcaggatgtaacgataat
gaatcaggatcaggagcagatcattttcgcatttccgccggttctgggctatggccttatgtaccaaaatctgtccagccgcttgccgtcatac
aagctatgcgcctttgattttattgaggaggaagaccggcttgaccgctatgcggatttgatccagaagctgcagccggaagggcctttaaca
ttgtttggatattcagcgggatgcagcctggcgtttgaagctgcgaaaaagcttgaggaacaaggccgtattgttcagcggatcatcatggtg
gattcctataaaaaacaaggtgtcagtgatctggacggacgcacggttgaaagtgatgtcgaagcgttgatgaatgtcaatcgggacaatga
agcgctcaacagcgaagccgtcaaacacggcctcaagcaaaaaacacatgccttttactcatactacgtcaacctgatcagcacaggccag
gtgaaagcagatattgatctgttgacttccggcgctgattttgacatgccggaatggcttgcatcatgggaagaagctacaacaggtgtttacc
gtgtgaaaagaggcttcggaacacacgcagaaatgctgcagggcgaaacgctagataggaatgcggagattttgctcgaatttcttaataca
caaaccgtaacggtttcataaatgaagtgatgaaaggaggagacagccaatgagccaactcttcaaatcatttgatgcgtcggaaaaaacac
agctcatctgttttccgtttgccggcggctattcggcgtcgtttcgccctctccatgcttttttgcagggggagtgcgagatgctcgctgccgag
ccgccgggacacggcacgaatcaaacgtcagccattgaggatctcgaagagctgacggatttgtacaagcaagaactgaaccttcgccct
gatcggccgtttgtgctgttcggacacagtatgggcggaatgatcaccttcaggctggcgcaaaagcttgagcgtgaaggcatctttccgca
ggcggttatcatttctgcaatccagccgcctcatattcagcggaagaaagtgtcccacctgcctgatgatcagtttctcgatcatattatccaatt
aggcggaatgcccgcagagcttgttgaaaataaggaggtcatgtcctttttcctgccttctttccgatcagattaccgggctcttgaacaatttg
agctttacgatctggcccagatccagtcgcctgttcatgtctttaacgggcttgatgataaaaaatgcatacgagatgcggaagggtggaaga
agtgggcaaaagacatcacattccatcaatttgacggcgggcacatgttcctgctgtcacaaacggaagaagtcgcagaacggatttttgcg
atcttgaatcagcatccgatcattcaaccgtgaagccgccccgcagggcgctccgcaggccgcttccggaccactccggaagcggccgt
gcggtcggaggatcc
ME-B0025

SEQ ID NO: 27

gaattcgcatgcatcgacaaaaatgtcatgaaagaatcgttgtaagacgctcttcgcaagggtgtctttttttgcctttttttcggtttttgcgcggt
acacatagtcatgtaaagattgtaaattgcattcagcaataaaaaaagattgaacgcagcagtttggtttaaaaatttttatttttctgtaaataatgt
ttagtggaaatgattgcggcatcccgcaaaaaatattgctgtaaataaactggaatctttcggcatcccgcatgaaacttttcacccatttttcgg
tgataaaaacatttttttcatttaaactgaacggtagaaagataaaaaatattgaaaacaatgaataaatagccaaaattggtttcttattagggtg
gggtcttgcggtctttatccgcttatgttaaacgccgcaatgctgactgacggcagcctgctttaatagcggccatctgttttttgattggaagca
ctgctttttaagtgtagtactttgggctatttcggctgttagttcataagaattaaaagctgatatggataagaaagagaaaatgcgttgcacatgt
tcactgcttataaagattaggggaggtatgacaatatggaaataactttttaccctttaacggatgcacaaaaacgaatttggtacacagaaaa
attttatcctcacacgagcatttcaaatcttgcggggattggtaagctggtttcagctgatgcgattgattatgtgcttgttgagcaggcgattcaa
gagtttattcgcagaaatgacgccatgcgccttcggttgcggctagatgaaaacggggagcctgttcaatatattagcgagtatcggcctgtt
gatataaaacatactgacactactgaagatccgaatgcgatagagtttatttcacaatggagccgggaggaaacgaagaaacctttgccgct
atacgattgtgatttgttccgtttttccttgttcaccataaaggaaaatgaagtgtggttttacgcaaatgttcatcacgtgatttctgatggtatctc
catgaatattctcgggaatgcgatcatgcacatttatttagaattagccagcggctcagagacaaaagaaggaatctcgcattcatttatcgatc
atgttttatctgaacaggaatatgctcaatcgaagcggtttgaaaaggacaaggcgttttggaacaaacaatttgaatcggtgcctgaacttgtt
tccttgaaacggaatgcatccgcagggggaagtttagatgctgagaggttctctaaagatgtgcctgaagcgcttcatcagcagattctgtcg
ttttgtgaggcgaataaagtcagtgttctttcggtatttcaatcgctgctcgccgcctatttgtacagggtcagcggccagaatgatgttgtgacg
ggaacatttatgggcaaccggacaaatgcgaaagagaagcagatgcttggcatgtttgtttctacggttccgcttcggacaaacattgacgg
cgggcaggcgttttcagaatttgtcaaagaccggatgaaggatctgatgaagacacttcgccaccaaaagtatccgtataatctcctaatcaa
cgatttgcgtgaaacaaagagctctctgaccaagctgttcacggtttctcttgaatatcaagtgatgcagtggcagaaagaagaggatcttgc
ctttttgactgagccgattttcagcggcagcggattaaatgatgtctcaattcatgtaaaggatcgatgggatactgggaaactcaccatagatt
ttgattaccgcactgatttattttcacgtgaagaaatcaacatgatttgtgagcgcatgattaccatgctggagaacgcgttaacgcatccagaa
catacaattgatgaattaacactgatttctgatgcggagaagcagatgattctcaaaacatggaacgccacaggaaaaacgtatccatatata
acttttcatgagttgtttgagcagcaggcgaaaaagacgcctgatagagcggctgtcagctatgaaggtcaaacattgacgtatcgggagctt
gatgagaaaagcacacagctggccatttatttgcaggcgcatggagtgggtcctgaccgtctggcggggatctatgtggatcgatcgctgg
acatgctagtgggtttattagcgatcctcaaggctgggggagcgtatgtgccgctagacccgtcctatccggctgaacgattagaatacatgc
ttgaggacagtgaagttttcattacactgacgacatcggaattagtaaatacgttgagttggaacggtgtcacaacagcccttttagatcaagat
tgggatgaaattgctcaaacagcctctgatcgaaaagtgcttacacgcactgtcacgccagagaacttggcatatgtcatttatacatccggc
agcacaggaaagccaaaaggtgtcatgataccacataaagctttgacaaactttctcgtttcgatgggggaaacaccaggtcttacggcaga
ggataaaatgcttgctgtcacaacctactgttttgatattgcagctctggaattatttttgcctttaataaagggcgcacactgctatatttgtcaaa
cggagcatacaaaagacgttgaaaaactgaaacgggacatccgcgcgatcaaaccgacagtgatgcaggcaacccccgctacgtggaa
gatgctcttttattcaggctgggaaaatgaagagagcgtgaaaattttatgcggtggcgaagcattgcctgagacattaaaacgatatttcttag
atacgggcagcgaagcctggaatatgttcgggccaaccgaaacaactatctggtcagcggttcagcgcattaacgttgaatgctctcatgcc
acgataggaaggccaatcgccaatacacaaatctatattacggattctcagctcgcgccagtgccggcaggtgttccgggtgagctgtgcat
tgcaggagacggtgtggcgaagggctactacaaaaaggaagaattaacggattcgagattcattgacaacccttttgagcctgggtctaag
ctttatagaacgggagacatggcccgttggcttacgggagggcgaattgaatatataggccgcatcgataatcaagtaaaaatccgcggatt
ccgtattgaacttggtgatattgaaagcaggcttagtgagcatcccggcattctggaatgcgttgtggtcgcagatatggataacctagctgcc
tattatacagctaaacatgcaaatgcttctctcacagcgagagagctgcgtcattttgtgaaaaacgctttgcctgcctatatggtgccttcttatt
ttattcagcttgatcatatgccgttaactccgaacggaaagatagatagaaacagccttaagaatatcgatttatcaggggagcagctaaagc
aaaggcagacctctcctaagaacattcaggatactgtttttaccatttggcaggaagtgctgggcagaaagcaaattggcattcatgacgattt
ctttgcgctcggagggcattccttgaaggccatgaccgccgcgtcccgcatcaagaaagagctcgggattgatcttccagtgaagcttttgtt
tgaagcgccgacgatcgccggcatttcagcgtatttgaaaaacgggggctctgatggcttgcaggatgtaacgataatgaatcaggatcag
gagcagatcattttcgcatttccgccggttctgggctatggccttatgtaccaaaatctgtccagccgcttgccgtcatacaagctatgcgccttt
gattttattgaggaggaagaccggcttgaccgctatgcggatttgatccagaagctgcagccggaagggcctttaacattgtttggatattcag
cgggatgcagcctggcgtttgaagctgcgaaaaagcttgaggaacaaggccgtattgttcagcggatcatcatggtggattcctataaaaaa
caaggtgtcagtgatctggacggacgcacggttgaaagtgatgtcgaagcgttgatgaatgtcaatcgggacaatgaagcgctcaacagc
gaagccgtcaaacacggcctcaagcaaaaaacacatgccttttactcatactacgtcaacctgatcagcacaggccaggtgaaagcagata
ttgatctgttgacttccggcgctgattttgacatgccggaatggcttgcatcatgggaagaagctacaacaggtgtttaccgtgtgaaaagagg
cttcggaacacacgcagaaatgctgcagggcgaaacgctagataggaatgcggagattttgctcgaatttcttaatacacaaaccgtaacgg
tttcataaatgaagtgatgaaaggaggagacagccaatgagccaactcttcaaatcatttgatgcgtcggaaaaaacacagctcatctgttttc
cgtttgccggcggctattcggcgtcgtttcgccctctccatgcttttttgcagggggagtgcgagatgctcgctgccgagccgccgggacac
ggcacgaatcaaacgtcagccattgaggatctcgaagagctgacggatttgtacaagcaagaactgaaccttcgccctgatcggccgtttgt
gctgttcggacacagtatgggcggaatgatcaccttcaggctggcgcaaaagcttgagcgtgaaggcatctttccgcaggcggttatcattt
ctgcaatccagccgcctcatattcagcggaagaaagtgtcccacctgcctgatgatcagtttctcgatcatattatccaattaggcggaatgcc
cgcagagcttgttgaaaataaggaggtcatgtcctttttcctgccttctttccgatcagattaccgggctcttgaacaatttgagctttacgatctg
gcccagatccagtcgcctgttcatgtctttaacgggcttgatgataaaaaatgcatacgagatgcggaagggtggaagaagtgggcaaaag
acatcacattccatcaatttgacggcgggcacatgttcctgctgtcacaaacggaagaagtcgcagaacggatttttgcgatcttgaatcagc
atccgatcattcaaccgtgaagccgccccgcagggcgctccgcaggccgcttccggaccactccggaagcggccgtgcggtcggagga
tcc
ME-B0026

SEQ ID NO: 28

gaattcgcatgcatcgacaaaaatgtcatgaaagaatcgttgtaagacgctcttcgcaagggtgtctttttttgcctttttttcggtttttgcgcggt
acacatagtcatgtaaagattgtaaattgcattcagcaataaaaaaagattgaacgcagcagtttggtttaaaaatttttatttttctgtaaataatgt
ttagtggaaatgattgcggcatcccgcaaaaaatattgctgtaaataaactggaatctttcggcatcccgcatgaaacttttcacccatttttcgg
tgataaaaacatttttttcatttaaactgaacggtagaaagataaaaaatattgaaaacaatgaataaatagccaaaattggtttcttattagggtg
gggtcttgcggtctttatccgcttatgttaaacgccgcaatgctgactgacggcagcctgctttaatagcggccatctgttttttgattggaagca
ctgctttttaagtgtagtactttgggctatttcggctgttagttcataagaattaaaagctgatatggataagaaagagaaaatgcgttgcacatgt
tcactgcttataaagattaggggaggtatgacaatatggaaataactttttaccctttaacggatgcacaaaaacgaatttggtacacagaaaa
attttatcctcacacgagcatttcaaatcttgcggggattggtaagctggtttcagctgatgcgattgattatgtgcttgttgagcaggcgattcaa
gagtttattcgcagaaatgacgccatgcgccttcggttgcggctagatgaaaacggggagcctgttcaatatattagcgagtatcggcctgtt
gatataaaacatactgacactactgaagatccgaatgcgatagagtttatttcacaatggagccgggaggaaacgaagaaacctttgccgct
atacgattgtgatttgttccgtttttccttgttcaccataaaggaaaatgaagtgtggttttacgcaaatgttcatcacgtgatttctgatggtatctc
catgaatattctcgggaatgcgatcatgcacatttatttagaattagccagcggctcagagacaaaagaaggaatctcgcattcatttatcgatc
atgttttatctgaacaggaatatgctcaatcgaagcggtttgaaaaggacaaggcgttttggaacaaacaatttgaatcggtgcctgaacttgtt
tccttgaaacggaatgcatccgcagggggaagtttagatgctgagaggttctctaaagatgtgcctgaagcgcttcatcagcagattctgtcg
ttttgtgaggcgaataaagtcagtgttctttcggtatttcaatcgctgctcgccgcctatttgtacagggtcagcggccagaatgatgttgtgacg
ggaacatttatgggcaaccggacaaatgcgaaagagaagcagatgcttggcatgtttgtttctacggttccgcttcggacaaacattgacgg
cgggcaggcgttttcagaatttgtcaaagaccggatgaaggatctgatgaagacacttcgccaccaaaagtatccgtataatctcctaatcaa
cgatttgcgtgaaacaaagagctctctgaccaagctgttcacggtttctcttgaatatcaagtgatgcagtggcagaaagaagaggatcttgc
ctttttgactgagccgattttcagcggcagcggattaaatgatgtctcaattcatgtaaaggatcgatgggatactgggaaactcaccatagatt
ttgattaccgcactgatttattttcacgtgaagaaatcaacatgatttgtgagcgcatgattaccatgctggagaacgcgttaacgcatccagaa
catacaattgatgaattaacactgatttctgatgcggagaagcagatgattctcaaaacatggaacgccacaggaaaaacgtatccatatata
acttttcatgagttgtttgagcagcaggcgaaaaagacgcctgatagagcggctgtcagctatgaaggtcaaacattgacgtatcgggagctt
gatgagaaaagcacacagctggccatttatttgcaggcgcatggagtgggtcctgaccgtctggcggggatctatgtggatcgatcgctgg
acatgctagtgggtttattagcgatcctcaaggctgggggagcgtatgtgccgctagacccgtcctatccggctgaacgattagaatacatgc
ttgaggacagtgaagttttcattacactgacgacatcggaattagtaaatacgttgagttggaacggtgtcacaacagcccttttagatcaagat
tgggatgaaattgctcaaacagcctctgatcgaaaagtgcttacacgcactgtcacgccagagaacttggcatatgtcatttatacatccggc
agcacaggaaagccaaaaggtgtcatgataccacataaagctttgacaaactttctcgtttcgatgggggaaacaccaggtcttacggcaga
ggataaaatgcttgctgtcacaacctactgttttgatattgcagctctggaattatttttgcctttaataaagggcgcacactgctatatttgtcaaa
cggagcatacaaaagacgttgaaaaactgaaacgggacatccgcgcgatcaaaccgacagtgatgcaggcaacccccgctacgtggaa
gatgctcttttattcaggctgggaaaatgaagagagcgtgaaaattttatgcggtggcgaagcattgcctgagacattaaaacgatatttcttag
atacgggcagcgaagcctggaatatgttcgggccaaccgaaacaactatctggtcagcggttcagcgcattaacgttgaatgctctcatgcc
acgataggaaggccaatcgccaatacacaaatctatattacggattctcagctcgcgccagtgccggcaggtgttccgggtgagctgtgcat
tgcaggagacggtgtggcgaagggctactacaaaaaggaagaattaacggattcgagattcattgacaacccttttgagcctgggtctaag
ctttatagaacgggagacatggcccgttggcttacgggagggcgaattgaatatataggccgcatcgataatcaagtaaaaatccgcggatt
ccgtattgaacttggtgatattgaaagcaggcttagtgagcatcccggcattctggaatgcgttgtggtcgcagatatggataacctagctgcc
tattatacagctaaacatgcaaatgcttctctcacagcgagagagctgcgtcattttgtgaaaaacgctttgcctgcctatatggtgccttcttatt
ttattcagcttgatcatatgccgttaactccgaacggaaagatagatagaaacagccttaagaatatcgatttatcaggggagcagctaaagc
aaaggcagacctctcctaagaacattcaggatactgtttttaccatttggtctgaggttctcggcagaaagcaaattggcattcatgacgatttct
ttgcgctcggagggcattccttgaaggccatgaccgccgcgtcccgcatcaagaaagagctcgggattgatcttccagtgaagcttttgtttg
aagcgccgacgatcgccggcatttcagcgtatttgaaaaacgggggctctgatggcttgcaggatgtaacgataatgaatcaggatcagga
gcagatcattttcgcatttccgccggttctgggctatggccttatgtaccaaaatctgtccagccgcttgccgtcatacaagctatgcgcctttga
ttttattgaggaggaagaccggcttgaccgctatgcggatttgatccagaagctgcagccggaagggcctttaacattgtttggatattcagcg
ggatgcagcctggcgtttgaagctgcgaaaaagcttgaggaacaaggccgtattgttcagcggatcatcatggtggattcctataaaaaaca
aggtgtcagtgatctggacggacgcacggttgaaagtgatgtcgaagcgttgatgaatgtcaatcgggacaatgaagcgctcaacagcga
agccgtcaaacacggcctcaagcaaaaaacacatgccttttactcatactacgtcaacctgatcagcacaggccaggtgaaagcagatattg
atctgttgacttccggcgctgattttgacatgccggaatggcttgcatcatgggaagaagctacaacaggtgtttaccgtgtgaaaagaggctt
cggaacacacgcagaaatgctgcagggcgaaacgctagataggaatgcggagattttgctcgaatttcttaatacacaaaccgtaacggttt
cataaatgaagtgatgaaaggaggagacagccaatgagccaactcttcaaatcatttgatgcgtcggaaaaaacacagctcatctgttttccg
tttgccggcggctattcggcgtcgtttcgccctctccatgcttttttgcagggggagtgcgagatgctcgctgccgagccgccgggacacgg
cacgaatcaaacgtcagccattgaggatctcgaagagctgacggatttgtacaagcaagaactgaaccttcgccctgatcggccgtttgtgc
tgttcggacacagtatgggcggaatgatcaccttcaggctggcgcaaaagcttgagcgtgaaggcatctttccgcaggcggttatcatttctg
caatccagccgcctcatattcagcggaagaaagtgtcccacctgcctgatgatcagtttctcgatcatattatccaattaggcggaatgcccgc
agagcttgttgaaaataaggaggtcatgtcctttttcctgccttctttccgatcagattaccgggctcttgaacaatttgagctttacgatctggcc
cagatccagtcgcctgttcatgtctttaacgggcttgatgataaaaaatgcatacgagatgcggaagggtggaagaagtgggcaaaagaca
tcacattccatcaatttgacggcgggcacatgttcctgctgtcacaaacggaagaagtcgcagaacggatttttgcgatcttgaatcagcatcc
gatcattcaaccgtgaagccgccccgcagggcgctccgcaggccgcttccggaccactccggaagcggccgtgcggtcggaggatcc
ME-B0027

SEQ ID NO: 29

gaattcgcatgcatcgacaaaaatgtcatgaaagaatcgttgtaagacgctcttcgcaagggtgtctttttttgcctttttttcggtttttgcgcggt
acacatagtcatgtaaagattgtaaattgcattcagcaataaaaaaagattgaacgcagcagtttggtttaaaaatttttatttttctgtaaataatgt
ttagtggaaatgattgcggcatcccgcaaaaaatattgctgtaaataaactggaatctttcggcatcccgcatgaaacttttcacccatttttcgg
tgataaaaacatttttttcatttaaactgaacggtagaaagataaaaaatattgaaaacaatgaataaatagccaaaattggtttcttattagggtg
gggtcttgcggtctttatccgcttatgttaaacgccgcaatgctgactgacggcagcctgctttaatagcggccatctgttttttgattggaagca
ctgctttttaagtgtagtactttgggctatttcggctgttagttcataagaattaaaagctgatatggataagaaagagaaaatgcgttgcacatgt
tcactgcttataaagattaggggaggtatgacaatatggaaataactttttaccctttaacggatgcacaaaaacgaatttggtacacagaaaa
attttatcctcacacgagcatttcaaatcttgcggggattggtaagctggtttcagctgatgcgattgattatgtgcttgttgagcaggcgattcaa
gagtttattcgcagaaatgacgccatgcgccttcggttgcggctagatgaaaacggggagcctgttcaatatattagcgagtatcggcctgtt
gatataaaacatactgacactactgaagatccgaatgcgatagagtttatttcacaatggagccgggaggaaacgaagaaacctttgccgct
atacgattgtgatttgttccgtttttccttgttcaccataaaggaaaatgaagtgtggttttacgcaaatgttcatcacgtgatttctgatggtatctc
catgaatattctcgggaatgcgatcatgcacatttatttagaattagccagcggctcagagacaaaagaaggaatctcgcattcatttatcgatc
atgttttatctgaacaggaatatgctcaatcgaagcggtttgaaaaggacaaggcgttttggaacaaacaatttgaatcggtgcctgaacttgtt
tccttgaaacggaatgcatccgcagggggaagtttagatgctgagaggttctctaaagatgtgcctgaagcgcttcatcagcagattctgtcg
ttttgtgaggcgaataaagtcagtgttctttcggtatttcaatcgctgctcgccgcctatttgtacagggtcagcggccagaatgatgttgtgacg
ggaacatttatgggcaaccggacaaatgcgaaagagaagcagatgcttggcatgtttgtttctacggttccgcttcggacaaacattgacgg
cgggcaggcgttttcagaatttgtcaaagaccggatgaaggatctgatgaagacacttcgccaccaaaagtatccgtataatctcctaatcaa
cgatttgcgtgaaacaaagagctctctgaccaagctgttcacggtttctcttgaatatcaagtgatgcagtggcagaaagaagaggatcttgc
ctttttgactgagccgattttcagcggcagcggattaaatgatgtctcaattcatgtaaaggatcgatgggatactgggaaactcaccatagatt
ttgattaccgcactgatttattttcacgtgaagaaatcaacatgatttgtgagcgcatgattaccatgctggagaacgcgttaacgcatccagaa
catacaattgatgaattaacactgatttctgatgcggagaagcagatgattctcaaaacatggaacgccacaggaaaaacgtatccatatata
acttttcatgagttgtttgagcagcaggcgaaaaagacgcctgatagagcggctgtcagctatgaaggtcaaacattgacgtatcgggagctt
gatgagaaaagcacacagctggccatttatttgcaggcgcatggagtgggtcctgaccgtctggcggggatctatgtggatcgatcgctgg
acatgctagtgggtttattagcgatcctcaaggctgggggagcgtatgtgccgctagacccgtcctatccggctgaacgattagaatacatgc
ttgaggacagtgaagttttcattacactgacgacatcggaattagtaaatacgttgagttggaacggtgtcacaacagcccttttagatcaagat
tgggatgaaattgctcaaacagcctctgatcgaaaagtgcttacacgcactgtcacgccagagaacttggcatatgtcatttatacatccggc
agcacaggaaagccaaaaggtgtcatgataccacataaagctttgacaaactttctcgtttcgatgggggaaacaccaggtcttacggcaga
ggataaaatgcttgctgtcacaacctactgttttgatattgcagctctggaattatttttgcctttaataaagggcgcacactgctatatttgtcaaa
cggagcatacaaaagacgttgaaaaactgaaacgggacatccgcgcgatcaaaccgacagtgatgcaggcaacccccgctacgtggaa
gatgctcttttattcaggctgggaaaatgaagagagcgtgaaaattttatgcggtggcgaagcattgcctgagacattaaaacgatatttcttag
atacgggcagcgaagcctggaatatgttcgggccaaccgaaacaactatctggtcagcggttcagcgcattaacgttgaatgctctcatgcc
acgataggaaggccaatcgccaatacacaaatctatattacggattctcagctcgcgccagtgccggcaggtgttccgggtgagctgtgcat
tgcaggagacggtgtggcgaagggctactacaaaaaggaagaattaacggattcgagattcattgacaacccttttgagcctgggtctaag
ctttatagaacgggagacatggcccgttggcttacgggagggcgaattgaatatataggccgcatcgataatcaagtaaaaatccgcggatt
ccgtattgaacttggtgatattgaaagcaggcttagtgagcatcccggcattctggaatgcgttgtggtcgcagatatggataacctagctgcc
tattatacagctaaacatgcaaatgcttctctcacagcgagagagctgcgtcattttgtgaaaaacgctttgcctgcctatatggtgccttcttatt
ttattcagcttgatcatatgccgttaactccgaacggaaagatagatagaaacagccttaagaatatcgatttatcaggggagcagctaaagc
aaaggcagacctctcctaagaacattcaggatactgttgcacaaatatggtctgaggttctcggcagaaagcaaattggcattcatgacgattt
ctttgcgctcggagggcattccttgaaggccatgaccgccgcgtcccgcatcaagaaagagctcgggattgatcttccagtgaagcttttgtt
tgaagcgccgacgatcgccggcatttcagcgtatttgaaaaacgggggctctgatggcttgcaggatgtaacgataatgaatcaggatcag
gagcagatcattttcgcatttccgccggttctgggctatggccttatgtaccaaaatctgtccagccgcttgccgtcatacaagctatgcgccttt
gattttattgaggaggaagaccggcttgaccgctatgcggatttgatccagaagctgcagccggaagggcctttaacattgtttggatattcag
cgggatgcagcctggcgtttgaagctgcgaaaaagcttgaggaacaaggccgtattgttcagcggatcatcatggtggattcctataaaaaa
caaggtgtcagtgatctggacggacgcacggttgaaagtgatgtcgaagcgttgatgaatgtcaatcgggacaatgaagcgctcaacagc
gaagccgtcaaacacggcctcaagcaaaaaacacatgccttttactcatactacgtcaacctgatcagcacaggccaggtgaaagcagata
ttgatctgttgacttccggcgctgattttgacatgccggaatggcttgcatcatgggaagaagctacaacaggtgtttaccgtgtgaaaagagg
cttcggaacacacgcagaaatgctgcagggcgaaacgctagataggaatgcggagattttgctcgaatttcttaatacacaaaccgtaacgg
tttcataaatgaagtgatgaaaggaggagacagccaatgagccaactcttcaaatcatttgatgcgtcggaaaaaacacagctcatctgttttc
cgtttgccggcggctattcggcgtcgtttcgccctctccatgcttttttgcagggggagtgcgagatgctcgctgccgagccgccgggacac
ggcacgaatcaaacgtcagccattgaggatctcgaagagctgacggatttgtacaagcaagaactgaaccttcgccctgatcggccgtttgt
gctgttcggacacagtatgggcggaatgatcaccttcaggctggcgcaaaagcttgagcgtgaaggcatctttccgcaggcggttatcattt
ctgcaatccagccgcctcatattcagcggaagaaagtgtcccacctgcctgatgatcagtttctcgatcatattatccaattaggcggaatgcc
cgcagagcttgttgaaaataaggaggtcatgtcctttttcctgccttctttccgatcagattaccgggctcttgaacaatttgagctttacgatctg
gcccagatccagtcgcctgttcatgtctttaacgggcttgatgataaaaaatgcatacgagatgcggaagggtggaagaagtgggcaaaag
acatcacattccatcaatttgacggcgggcacatgttcctgctgtcacaaacggaagaagtcgcagaacggatttttgcgatcttgaatcagc
atccgatcattcaaccgtgaagccgccccgcagggcgctccgcaggccgcttccggaccactccggaagcggccgtgcggtcggagga
tcc
ME-B0028

SEQ ID NO: 30

gaattcgcatgcatcgacaaaaatgtcatgaaagaatcgttgtaagacgctcttcgcaagggtgtctttttttgcctttttttcggtttttgcgcggt
acacatagtcatgtaaagattgtaaattgcattcagcaataaaaaaagattgaacgcagcagtttggtttaaaaatttttatttttctgtaaataatgt
ttagtggaaatgattgcggcatcccgcaaaaaatattgctgtaaataaactggaatctttcggcatcccgcatgaaacttttcacccatttttcgg
tgataaaaacatttttttcatttaaactgaacggtagaaagataaaaaatattgaaaacaatgaataaatagccaaaattggtttcttattagggtg
gggtcttgcggtctttatccgcttatgttaaacgccgcaatgctgactgacggcagcctgctttaatagcggccatctgttttttgattggaagca
ctgctttttaagtgtagtactttgggctatttcggctgttagttcataagaattaaaagctgatatggataagaaagagaaaatgcgttgcacatgt
tcactgcttataaagattaggggaggtatgacaatatggaaataactttttaccctttaacggatgcacaaaaacgaatttggtacacagaaaa
attttatcctcacacgagcatttcaaatcttgcggggattggtaagctggtttcagctgatgcgattgattatgtgcttgttgagcaggcgattcaa
gagtttattcgcagaaatgacgccatgcgccttcggttgcggctagatgaaaacggggagcctgttcaatatattagcgagtatcggcctgtt
gatataaaacatactgacactactgaagatccgaatgcgatagagtttatttcacaatggagccgggaggaaacgaagaaacctttgccgct
atacgattgtgatttgttccgtttttccttgttcaccataaaggaaaatgaagtgtggttttacgcaaatgttcatcacgtgatttctgatggtatctc
catgaatattctcgggaatgcgatcatgcacatttatttagaattagccagcggctcagagacaaaagaaggaatctcgcattcatttatcgatc
atgttttatctgaacaggaatatgctcaatcgaagcggtttgaaaaggacaaggcgttttggaacaaacaatttgaatcggtgcctgaacttgtt
tccttgaaacggaatgcatccgcagggggaagtttagatgctgagaggttctctaaagatgtgcctgaagcgcttcatcagcagattctgtcg
ttttgtgaggcgaataaagtcagtgttctttcggtatttcaatcgctgctcgccgcctatttgtacagggtcagcggccagaatgatgttgtgacg
ggaacatttatgggcaaccggacaaatgcgaaagagaagcagatgcttggcatgtttgtttctacggttccgcttcggacaaacattgacgg
cgggcaggcgttttcagaatttgtcaaagaccggatgaaggatctgatgaagacacttcgccaccaaaagtatccgtataatctcctaatcaa
cgatttgcgtgaaacaaagagctctctgaccaagctgttcacggtttctcttgaatatcaagtgatgcagtggcagaaagaagaggatcttgc
ctttttgactgagccgattttcagcggcagcggattaaatgatgtctcaattcatgtaaaggatcgatgggatactgggaaactcaccatagatt
ttgattaccgcactgatttattttcacgtgaagaaatcaacatgatttgtgagcgcatgattaccatgctggagaacgcgttaacgcatccagaa
catacaattgatgaattaacactgatttctgatgcggagaaagaaaaagtcatttctaaatggaatgagacggcaaaatccgagaagctggtc
agccttcaggacatgttcgaaaagcaggcagttcttacgccagaacgtatcgctctcatgtgtgatgacattcaagtcaactatcgaaagctc
aatgaagaggcaaaccgcctcgcgcgtctgttgatcgaaaaagggattggtccggagcaatttgtcgctttggcgctgccgcgttcccctga
gatggtggcttcaatgcttggtgtgctcaagactggtgcggcgtatctcccccttgatccggagtttccagccgaccgcatttcttacatgctg
gaggatgcgaaaccttcatgcatcataacgactgaggaaatagcagccagtctgcctgatgacctggctgtacctgagcttgtgcttgatca
ggctgttacacaggagattataaaacgctattcgccggaaaatcaggatgtatcggtttcgcttgaccatcctgcgtatatcatctatacctcag
gatcaacaggaagaccgaagggagtcgttgtgacacagaaaagcttaagcaattttctgctgtctatgcaggaggcattttctctaggagaa
gaagacaggctgttggctgtgacgactgtcgcttttgatatttcagcattggagttatatcttccgctgattagcggagcgcaaatcgtgatcgc
aaagaaagaaacgatccgtgagccgcaggcattagctcaaatgattgaaaatttcgatattaacattatgcaggcgacaccgacactgtggc
acgctttggtaacgagtgaacctgagaaacttcgggggcttagagtgcttgtaggaggcgaggcgctgccgagcggtcttttgcaggaact
tcaagaccttcattgttcagtcacgaacttatacggtcccactgaaacaacgatttggtctgccgcagcttttcttgaagaagggctgaagggc
gttcctccgattgggaaaccgatttggaacacgcaggtgtatgtgcttgataatggattgcagccggtgccgccgggcgttgtcggagagct
ttatattgcaggaaccggcttggccagaggttatttccatcgtcctgatttaacggcggagcgcttcgttgcagatccatacggaccgccggg
aactcggatgtatcggaccggagaccaggcccgctggcgcgccgatgggtctttggattatatcgggcgggcggatcatcaaatcaaaatt
cgcggattccgaattgaacttggagaaattgatgccgtgcttgccaatcacccgcacattgaacaggccgcggttgtcgtacgggaagatca
gccgggagacaaacgattggcggcttatgtagtcgctgatgctgctattgatactgcagagcttcgtcgttatatgggggctagtcttcctgatt
atatggtaccgtcggcgtttgtggagatggacgagctgccgttaacacctaatggcaagcttgaccggaaagcactgccggcaccagactt
cagcacatctgtcagtgatcgggccccgcggactcctcaggaagagatattgtgtgacttgtttgcagaggttctcggtttggcacgcgtcgg
tattcatgacgatttctttgcgctcggagggcattccttgaaggccatgaccgccgcgtcccgcatcaagaaagagctcgggattgatcttcc
agtgaagcttttgtttgaagcgccgacgatcgccggcatttcagcgtatttgaaaaacgggggctctgatggcttgcaggatgtaacgataat
gaatcaggatcaggagcagatcattttcgcatttccgccggttctgggctatggccttatgtaccaaaatctgtccagccgcttgccgtcatac
aagctatgcgcctttgattttattgaggaggaagaccggcttgaccgctatgcggatttgatccagaagctgcagccggaagggcctttaaca
ttgtttggatattcagcgggatgcagcctggcgtttgaagctgcgaaaaagcttgaggaacaaggccgtattgttcagcggatcatcatggtg
gattcctataaaaaacaaggtgtcagtgatctggacggacgcacggttgaaagtgatgtcgaagcgttgatgaatgtcaatcgggacaatga
agcgctcaacagcgaagccgtcaaacacggcctcaagcaaaaaacacatgccttttactcatactacgtcaacctgatcagcacaggccag
gtgaaagcagatattgatctgttgacttccggcgctgattttgacatgccggaatggcttgcatcatgggaagaagctacaacaggtgtttacc
gtgtgaaaagaggcttcggaacacacgcagaaatgctgcagggcgaaacgctagataggaatgcggagattttgctcgaatttcttaataca
caaaccgtaacggtttcataaatgaagtgatgaaaggaggagacagccaatgagccaactcttcaaatcatttgatgcgtcggaaaaaacac
agctcatctgttttccgtttgccggcggctattcggcgtcgtttcgccctctccatgcttttttgcagggggagtgcgagatgctcgctgccgag
ccgccgggacacggcacgaatcaaacgtcagccattgaggatctcgaagagctgacggatttgtacaagcaagaactgaaccttcgccct
gatcggccgtttgtgctgttcggacacagtatgggcggaatgatcaccttcaggctggcgcaaaagcttgagcgtgaaggcatctttccgca
ggcggttatcatttctgcaatccagccgcctcatattcagcggaagaaagtgtcccacctgcctgatgatcagtttctcgatcatattatccaatt
aggcggaatgcccgcagagcttgttgaaaataaggaggtcatgtcctttttcctgccttctttccgatcagattaccgggctcttgaacaatttg
agctttacgatctggcccagatccagtcgcctgttcatgtctttaacgggcttgatgataaaaaatgcatacgagatgcggaagggtggaaga
agtgggcaaaagacatcacattccatcaatttgacggcgggcacatgttcctgctgtcacaaacggaagaagtcgcagaacggatttttgcg
atcttgaatcagcatccgatcattcaaccgtgaagccgccccgcagggcgctccgcaggccgcttccggaccactccggaagcggccgt
gcggtcggaggatcc
ME-B0029

SEQ ID NO: 31

gaattcgcatgcatcgacaaaaatgtcatgaaagaatcgttgtaagacgctcttcgcaagggtgtctttttttgcctttttttcggtttttgcgcggt
acacatagtcatgtaaagattgtaaattgcattcagcaataaaaaaagattgaacgcagcagtttggtttaaaaatttttatttttctgtaaataatgt
ttagtggaaatgattgcggcatcccgcaaaaaatattgctgtaaataaactggaatctttcggcatcccgcatgaaacttttcacccatttttcgg
tgataaaaacatttttttcatttaaactgaacggtagaaagataaaaaatattgaaaacaatgaataaatagccaaaattggtttcttattagggtg
gggtcttgcggtctttatccgcttatgttaaacgccgcaatgctgactgacggcagcctgctttaatagcggccatctgttttttgattggaagca
ctgctttttaagtgtagtactttgggctatttcggctgttagttcataagaattaaaagctgatatggataagaaagagaaaatgcgttgcacatgt
tcactgcttataaagattaggggaggtatgacaatatggaaataactttttaccctttaacggatgcacaaaaacgaatttggtacacagaaaa
attttatcctcacacgagcatttcaaatcttgcggggattggtaagctggtttcagctgatgcgattgattatgtgcttgttgagcaggcgattcaa
gagtttattcgcagaaatgacgccatgcgccttcggttgcggctagatgaaaacggggagcctgttcaatatattagcgagtatcggcctgtt
gatataaaacatactgacactactgaagatccgaatgcgatagagtttatttcacaatggagccgggaggaaacgaagaaacctttgccgct
atacgattgtgatttgttccgtttttccttgttcaccataaaggaaaatgaagtgtggttttacgcaaatgttcatcacgtgatttctgatggtatctc
catgaatattctcgggaatgcgatcatgcacatttatttagaattagccagcggctcagagacaaaagaaggaatctcgcattcatttatcgatc
atgttttatctgaacaggaatatgctcaatcgaagcggtttgaaaaggacaaggcgttttggaacaaacaatttgaatcggtgcctgaacttgtt
tccttgaaacggaatgcatccgcagggggaagtttagatgctgagaggttctctaaagatgtgcctgaagcgcttcatcagcagattctgtcg
ttttgtgaggcgaataaagtcagtgttctttcggtatttcaatcgctgctcgccgcctatttgtacagggtcagcggccagaatgatgttgtgacg
ggaacatttatgggcaaccggacaaatgcgaaagagaagcagatgcttggcatgtttgtttctacggttccgcttcggacaaacattgacgg
cgggcaggcgttttcagaatttgtcaaagaccggatgaaggatctgatgaagacacttcgccaccaaaagtatccgtataatctcctaatcaa
cgatttgcgtgaaacaaagagctctctgaccaagctgttcacggtttctcttgaatatcaagtgatgcagtggcagaaagaagaggatcttgc
ctttttgactgagccgattttcagcggcagcggattaaatgatgtctcaattcatgtaaaggatcgatgggatactgggaaactcaccatagatt
ttgattaccgcactgatttattttcacgtgaagaaatcaacatgatttgtgagcgcatgattaccatgctggagaacgcgttaacgcatccagaa
catacaattgatgaattaacactgatttctgatgcggagaagcagatgattctcaaaacatggaacgccacaggaaaaacgtatccatatata
acttttcatgagttgtttgagcagcaggcgaaaaagacgcctgatagagcggctgtcagctatgaaggtcaaacattgacgtatcgggagctt
gatgagaaaagcacacagctggccatttatttgcaggcgcatggagtgggtcctgaccgtctggcggggatctatgtggatcgatcgctgg
acatgctagtgggtttattagcgatcctcaaggctgggggagcgtatgtgccgctagacccgtcctatccggctgaacgattagaatacatgc
ttgaggacagtgaagttttcattacactgacgacatcggaattagtaaatacgttgagttggaacggtgtcacaacagcccttttagatcaagat
tgggatgaaattgctcaaacagcctctgatcgaaaagtgcttacacgcactgtcacgccagagaacttggcatatgtcatttatacatccggc
agcacaggaaagccaaaaggtgtcatgataccacataaagctttgacaaactttctcgtttcgatgggggaaacaccaggtcttacggcaga
ggataaaatgcttgctgtcacaacctactgttttgatattgcagctctggaattatttttgcctttaataaagggcgcacactgctatatttgtcaaa
cggagcatacaaaagacgttgaaaaactgaaacgggacatccgcgcgatcaaaccgacagtgatgcaggcaacccccgctacgtggaa
gatgctcttttattcaggctgggaaaatgaagagagcgtgaaaattttatgcggtggcgaagcattgcctgagacattaaaacgatatttcttag
atacgggcagcgaagcctggaatatgttcgggccaaccgaaacaactatctggtcagcggttcagcgcattaacgttgaatgctctcatgcc
acgataggaaggccaatcgccaatacacaaatctatattacggattctcagctcgcgccagtgccggcaggtgttccgggtgagctgtgcat
tgcaggagacggtgtggcgaagggctactacaaaaaggaagaattaacggattcgagattcattgacaacccttttgagcctgggtctaag
ctttatagaacgggagacatggcccgttggcttacgggagggcgaattgaatatataggccgcatcgataatcaagtaaaaatccgcggatt
ccgtattgaacttggtgatattgaaagcaggcttagtgagcatcccggcattctggaatgcgttgtggtcgcagatatggataacctagctgcc
tattatacagctaaacatgcaaatgcttctctcacagcgagagagctgcgtcattttgtgaaaaacgctttgcctgcctatatggtgccttcttatt
ttattcagcttgatcatatgccgttaactccgaacggaaagatagatagaaacagccttaagaatatcgatttatcaggggagcagctaaagc
aaaggcagacctctcctaagaacattcaggatactgttgcacaaatatggtctgaggttctcggcagaaagcaaattggcattcatgacgattt
ctttgcgctcggagggcattccttgaaggccatgaccgccgcgtcccgcatcaagaaagagctcgggattgatcttccagtgaagcttttgtt
tgaagcgccgacgatcgccggcatttcagcgtatttgaaaaacgggggctctgatggcttgcaggatgtaacgataatgaatcaggatcag
gagcagatcattttcgcatttccgccggttctgggctatggccttatgtaccaaaatctgtccagccgcttgccgtcatacaagctatgcgccttt
gattttattgaggaggaagaccggcttgaccgctatgcggatttgatccagaagctgcagccggaagggcctttaacattgtttggatattcag
cgggatgcagcctggcgtttgaagctgcgaaaaagcttgaggaacaaggccgtattgttcagcggatcatcatggtggattcctataaaaaa
caaggtgtcagtgatctggacggacgcacggttgaaagtgatgtcgaagcgttgatgaatgtcaatcgggacaatgaagcgctcaacagc
gaagccgtcaaacacggcctcaagcaaaaaacacatgccttttactcatactacgtcaacctgatcagcacaggccaggtgaaagcagata
ttgatctgttgacttccggcgctgattttgacatgccggaatggcttgcatcatgggaagaagctacaacaggtgtttaccgtgtgaaaagagg
cttcggaacacacgcagaaatgctgcagggcgaaacgctagataggaatgcggagattttgctcgaatttcttaatacacaaaccgtaacgg
tttcataaatgaagtgatgaaaggaggagacagccaatgagccaactcttcaaatcatttgatgcgtcggaaaaaacacagctcatctgttttc
cgtttgccggcggctattcggcgtcgtttcgccctctccatgcttttttgcagggggagtgcgagatgctcgctgccgagccgccgggacac
ggcacgaatcaaacgtcagccattgaggatctcgaagagctgacggatttgtacaagcaagaactgaaccttcgccctgatcggccgtttgt
gctgttcggacacagtatgggcggaatgatcaccttcaggctggcgcaaaagcttgagcgtgaaggcatctttccgcaggcggttatcattt
ctgcaatccagccgcctcatattcagcggaagaaagtgtcccacctgcctgatgatcagtttctcgatcatattatccaattaggcggaatgcc
cgcagagcttgttgaaaataaggaggtcatgtcctttttcctgccttctttccgatcagattaccgggctcttgaacaatttgagctttacgatctg
gcccagatccagtcgcctgttcatgtctttaacgggcttgatgataaaaaatgcatacgagatgcggaagggtggaagaagtgggcaaaag
acatcacattccatcaatttgacggcgggcacatgttcctgctgtcacaaacggaagaagtcgcagaacggatttttgcgatcttgaatcagc
atccgatcattcaaccgtgaagccgccccgcagggcgctccgcaggccgcttccggaccactccggaagcggccgtgcggtcggagga
tcc

SEQ ID NO: 32

atcgacaaaaatgtcatgaaagaatcgttgtaagacgctcttcgcaagggtgtctttttttgcctttttttcggtttttgcgcggtacacatagtcatgta
aagattgtaaattgcattcagcaataaaaaaagattgaacgcagcagtttggtttaaaaatttttatttttctgtaaataatgtttagtggaaatgattgcg
gcatcccgcaaaaaatattgctgtaaataaactggaatctttcggcatcccgcatgaaacttttcacccatttttcggtgataaaaacatttttttcattta
aactgaacggtagaaagataaaaaatattgaaaacaatgaataaatagccaaaattggtttcttattagggtggggtcttgcggtctttatccgcttat
gttaaacgccgcaatgctgactgacggcagcctgctttaatagcggccatctgttttttgattggaagcactgctttttaagtgtagtactttgggctat
ttcggctgttagttcataagaattaaaagctgatatggataagaaagagaaaatgcgttgcacatgttcactgcttataaagattaggggaggtatg
acaat

SEQ ID NO: 33

Atgagccaactcttcaaatcatttgatgcgtcggaaaaaacacagctcatctgttttccgtttgccggcggctattcggcgtcgtttcgccctctcca
tgcttttttgcagggggagtgcgagatgctcgctgccgagccgccgggacacggcacgaatcaaacgtcagccattgaggatctcgaagagct
gacggatttgtacaagcaagaactgaaccttcgccctgatcggccgtttgtgctgttcggacacagtatgggcggaatgatcaccttcaggctgg
cgcaaaagcttgagcgtgaaggcatctttccgcaggcggttatcatttctgcaatccagccgcctcatattcagcggaagaaagtgtcccacctg
cctgatgatcagtttctcgatcatattatccaattaggcggaatgcccgcagagcttgttgaaaataaggaggtcatgtcctttttcctgccttctttcc
gatcagattaccgggctcttgaacaatttgagctttacgatctggcccagatccagtcgcctgttcatgtctttaacgggcttgatgataaaaaatgc
atacgagatgcggaagggtggaagaagtgggcaaaagacatcacattccatcaatttgacggcgggcacatgttcctgctgtcacaaacggaa
gaagtcgcagaacggatttttgcgatcttgaatcagcatccgatcattcaaccgtga

SEQ ID NO: 34

CACGAGCATTTCAAATCTTG

SEQ ID NO: 35

CTGAACAATACGGCCTTG

SEQ ID NO: 36

CACGAGCATTTCAAATCTTG

SEQ ID NO: 37

CTGAACAATACGGCCTTG

SEQ ID NO: 38

CACGAGCATTTCAAATCTTG

SEQ ID NO: 39

CTGAACAATACGGCCTTG

SEQ ID NO: 40

DILQLGMIWK

SEQ ID NO: 41

DILQLGLIWK

SEQ ID NO: 42

DILQLGVIWK
SrfAA

SEQ ID NO: 43

MEITFYPLTDAQKRIWYTEKFYPHTSISNLAGIGKLVSADAIDYVLVEQAIQEFIRRNDAMR
LRLRLDENGEPVQYISEYRPVDIKHTDTTEDPNAIEFISQWSREETKKPLPLYDCDLFRFSLF
TIKENEVWFYANVHHVISDGISMNILGNAIMHIYLELASGSETKEGISHSFIDHVLSEQEYA
QSKRFEKDKAFWNKQFESVPELVSLKRNASAGGSLDAERFSKDVPEALHQQILSFCEANK
VSVLSVFQSLLAAYLYRVSGQNDVVTGTFMGNRTNAKEKQMLGMFVSTVPLRTNIDGGQ
AFSEFVKDRMKDLMKTLRHQKYPYNLLINDLRETKSSLTKLFTVSLEYQVMQWQKEEDL
AFLTEPIFSGSGLNDVSIHVKDRWDTGKLTIDFDYRTDLFSREEINMICERMITMLENALTH
PEHTIDELTLISDAEKEKLLARAGGKSVSYRKDMTIPELFQEKAELLSDHPAVVFEDRTLSY
RTLHEQSARIANVLKQKGVGPDSPVAVLIERSERMITAIMGILKAGGAYVPIDPGFPAERIQ
YILEDCGADFILTESKVAAPEADAELIDLDQAIEEGAEESLNADVNARNLAYIIYTSGTTGR
PKGVMIEHRQVHHLVESLQQTIYQSGSQTLRMALLAPFHFDASVKQIFASLLLGQTLYIVP
KKTVTNGAALTAYYRKNSIEATDGTPAHLQMLAAAGDFEGLKLKHMLIGGEGLSSVVAD
KLLKLFKEAGTAPRLTNVYGPTETCVDASVHPVIPENAVQSAYVPIGKALGNNRLYILDQ
KGRLQPEGVAGELYIAGDGVGRGYLHLPELTEEKFLQDPFVPGDRMYRTGDVVRWLPDG
TIEYLGREDDQVKVRGYRIELGEIEAVIQQAPDVAKAVVLARPDEQGNLEVCAYVVQKPG
SEFAPAGLREHAARQLPDYMVPAYFTEVTEIPLTPSGKVDRRKLFALEVKAVSGTAYTAP
RNETEKAIAAIWQDVLNVEKAGIFDNFFETGGHSLKAMTLLTKIHKETGIEIPLQFLFEHPTI
TALAEEADHRESKAFAVIEPAEKQEHYPLSLAQQRTYIVSQFEDAGVGYNMPAAAILEGP
LDIQKLERAFQGLIRRHESLRTSFVLENSTPRQKIHDSVDFNIEMIERGGRSDEAIMASFVRT
FDLAKAPLFRIGLLGLEENRHMLLFDMHHLISDGVSIGIMLEELARIYKGEQLPDLRLQYK
DYAVWQSRQAAEGYKKDQAYWKEVFAGELPVLQLLSDYPRPPVQSFEGDRVSIKLDAG
VKDRLNRLAEQNGATLYMVMLSAYYTLLSKYTGQDDIIVGTPSAGRNHSDTEGIIGMFVN
TLAIRSEVKQNETFTQLISRVRKRVLDAFSHQDYPFEWLVEDLNIPRDVSRHPLFDTMFSL
QNATEGIPAVGDLSLSVQETNFKIAKFDLTVQARETDEGIEIDVDYSTKLFKQSTADRLLT
HFARLLEDAAADPEKPISEYKLLSEEEAASQIQQFNPGRTPYPKDKTIVQLFEEQAANTPDH
TALQYEGESLTYRELNERANRLARGILSLGAGEGRTAAVLCERSMDMIVSILAVLKSGSA
YVPIDPEHPIQRMQHFFRDSGAKVLLTQRKLKALAEEAEFKGVIVLADEEESYHADARNL
ALPLDSAAMANLTYTSGTTGTPKGNIVTHANILRTVKETNYLSITEQDTILGLSNYVFDAF
MFDMFGSLLNGAKLVLIPKETVLDMARLSRVIERENISILMITTALFHLLVDLNPACLSTLR
KIMFGGERASVEHVRKALQTVGKGKLLHMYGPSESTVFATYHPVDELEEHTLSVPIGKPV
SNTEVYILDRTGHVQPAGIAGELCVSGEGLVKGYYNRPELTEEKFVPHPFTSGERMYKTG
DLARWLPNGDIEFIGRIDHQVKIRGQRIELGEIEHQLQTHDRVQESVVLAVDQGAGDKLLC
AYYVGEGDISSQEMREHAAKDLPAYMVPAVFIQMDELPLTGNGKIDRRALPIPDANVSRG
VSYVAPRNGTEQKVADIWAQVLQAEQVGAYDHFFDIGGHSLAGMKMLALVHQELGVEL
SLKDLFQSPTVEGLAQVIASAEKGTAASISPAEKQDTYPVSSPQKRMYVLQQLEDAQTSY
NMPAVLRLTGELDVERLNSVMQQLMQRHEALRTTFEIKDGETVQRIWEEAECEIAYFEAP
EEETERIVSEFIKPFKIDQLPLFRIGLIKHSDTEHVLLFDMHHIISDGASVGVLIEELSKLYDG
ETLEPLRIQYKDYAVWQQQFIQSELYKKQEEHWLKELDGELPVLTLPTDYSRPAVQTFEG
DRIAFSLEAGKADALRRLAKETDSTLYMVLLASYSAFLSKISGQDDIIVGSPVAGRSQADV
SRVIGMFVNTLALRTYPKGEKTFADYLNEVKETALSAFDAQDYPLEDLIGNVQVQRDTSR
NPLFDAVFSMQNANIKDLTMKGIQLEPHPFERKTAKFDLTLTADETDGGLTFVLEYNTAL
FKQETIERWKQYWMELLDAVTGNPNQPLSSLSLVTETEKQALLEAWKGKALPVPTDKTV
HQLFEETAQRHKDRPAVTYNGQSWTYGELNAKANRLARILMDCGISPDDRVGVLTKPSL
EMSAAVLGVLKAGAAFVPIDPDYPDQRIEYILQDSGAKLLLKQEGISVPDSYTGDVILLDG
SRTILSLPLDENDEENPETAVTAENLAYMIYTSGTTGQPKGVMVEHHALVNLCFWHHDAF
SMTAEDRSAKYAGFGFDASIWEMFPTWTIGAELHVIEEAIRLDIVRLNDYFETNGVTITFLP
TQLAEQFMELENTSLRVLLTGGDKLKRAVKKPYTLVNNYGPTENTVVATSAEIHPEEGSL
SIGRAIANTRVYILGEGNQVQPEGVAGELCVAGRGLARGYLNREDETAKRFVADPFVPGE
RMYRTGDLVKWTGGGIEYIGRIDQQVKVRGYRIELSEIEVQLAQLSEVQDAAVTAVKDK
GGNTAIAAYVTPESADIEALKSALKETLPDYMIPAFWVTLNELPVTANGKVDRKALPEPDI
EAGSGEYKAPTTDMEELLAGIWQDVLGMSEVGVTDNFFSLGGDSIKGIQMASRLNQHGW
KLEMKDLFQHPTIEELTQYVERAEGKQADQGPVEGEVILTPIQRWFFEKNFTNKHHWNQS
VMLHAKKGFDPERVEKTLQALIEHHDALRMVYREGQEDVIQYNRGLEAASAQLEVIQIEG
QAADYEDRIEREAERLQSSIDLQEGGLLKAGLFQAEDGDHLLLAIHHLVVDGVSWRILLE
DFAAVYTQLEQGNEPVLPQKTHSFAEYAERLQDFANSKAFLKEKEYWRQLEEQAVAAKL
PKDRESGDQRMKHTKTIEFSLTAEETEQLTTKVHEAYHTEMNDILLTAFGLAMKEWTGQ
DRVSVHLEGHGREEIIEDLTISRTVGWFTSMYPMVLDMKHADDLGYQLKQMKEDIRHVP
NKGVGYGILRYLTAPEHKEDVAFSIQPDVSFNYLGQFDEMSDAGLFTRSELPSGQSLSPET
EKPNALDVVGYIENGKLTMSLAYHSLEFHEKTVQTFSDSFKAHLLRIIEHCLSQDGTELTPS
DLGDDDLTLDELDKLMEIF
SrfAB

SEQ ID NO: 44

MSKKSIQKVYALTPMQEGMLYHAMLDPHSSSYFTQLELGIHGAFDLEIFEKSVNELIRSYD
ILRTVFVHQQLQKPRQVVLAERKTKVHYEDISHADENRQKEPHERYKQDVQRQGFNLAK
DILFKVAVFRLAADQLYLVWSNHHIMMDGWSMGVLMKSLFQNYEALRAGRTPANGQG
KPYSDYIKWLGKQDNEEAESYWSERLAGFEQPSVLPGRLPVKKDEYVNKEYSFTWDETL
VARIQQTANLHQVTGPNLFQAVWGIVLSKYNFTDDVIFGTVVSGRPSEINGIETMAGLFIN
TIPVRVKVERDAAFADIFTAVQQHAVEAERYDYVPLYEIQKRSALDGNLLNHLVAFENYP
LDQELENGSMEDRLGFSIKVESAFEQTSFDFNLIVYPGKTWTVKIKYNGAAFDSAFIERTA
EHLTRMMEAAVDQPAAFVREYGLVGDEEQRQIVEVFNSTKAELPEGMAVHQVFEEQAK
RTPASTAVVYEGTKLTYRELNAAANRLARKLVEHGLQKGETAAIMNDRSVETVVGMLA
VLKAGAAYVPLDPALPGDRLRFMAEDSSVRMVLIGNSYTGQAHQLQVPVLTLDIGFEESE
AADNLNLPSAPSDLAYIMYTSGSTGKPKGVMIEHKSILRLVKNAGYVPVTEEDRMAQTGA
VSFDAGTFEVFGALLNGAALYPVKKETLLDAKQFAAFLREQSITTMWLTSPLFNQLAAKD
AGMFGTLRHLIIGGDALVPHIVSKVKQASPSLSLWNGYGPTENTTFSTSFLIDREYGGSIPIG
KPIGNSTAYIMDEQQCLQPIGAPGELCVGGIGVARGYVNLPELTEKQFLEDPFRPGERIYRT
GDLARWLPDGNIEFLGRIDNQVKVRGFRIELGEIETKLNMAEHVTEAAVIIRKNKADENEI
CAYFTADREVAVSELRKTLSQSLPDYMVPAHLIQMDSLPLTPNGKINKKELPAPQSEAVQP
EYAAPKTESEKKLAEIWEGILGVKAGVTDNFFMIGGHSLKAMMMTAKIQEHFHKEVPIKV
LFEKPTIQELALYLEENESKEEQTFEPIRQASYQQHYPVSPAQRRMYILNQLGQANTSYNV
PAVLLLEGEVDKDRLENAIQQLINRHEILRTSFDMIDGEVVQTVHKNISFQLEAAKGREED
AEEIIKAFVQPFELNRAPLVRSKLVQLEEKRHLLLIDMHHIITDGSSTGILIGDLAKIYQGAD
LELPQIHYKDYAVWHKEQTNYQKDEEYWLDVFKGELPILDLPADFERPAERSFAGERVM
FGLDKQITAQIKSLMAETDTTMYMFLLAAFNVLLSKYASQDDIIVGSPTAGRTHPDLQGVP
GMFVNTVALRTAPAGDKTFAQFLEEVKTASLQAFEHQSYPLEELIEKLPLTRDTSRSPLFS
VMFNMQNMEIPSLRLGDLKISSYSMLHHVAKFDLSLEAVEREEDIGLSFDYATALFKDETI
RRWSRHFVNIIKAAAANPNVRLSDVDLLSSAETAALLEERHMTQITEATFAALFEKQAQQ
TPDHSAVKAGGNLLTYRELDEQANQLAHHLRAQGAGNEDIVATVMDRSAEVMVSILGV
MKAGAAFLPIDPDTPEERIRYSLEDSGAKFAVVNERNMTAIGQYEGIIVSLDDGKWRNESK
ERPSSISGSRNLAYVIYTSGTTGKPKGVQIEHRNLTNYVSWFSEEAGLTENDKTVLLSSYAF
DLGYTSMFPVLLGGGELHIVQKETYTAPDEIAHYIKEHGITYIKLTPSLFHTIVNTASFAKD
ANFESLRLIVLGGEKIIPTDVIAFRKMYGHTEFINHYGPTEATIGAIAGRVDLYEPDAFAKRP
TIGRPIANAGALVLNEALKLVPPGASGQLYITGQGLARGYLNRPQLTAERFVENPYSPGSL
MYKTGDVVRRLSDGTLAFIGRADDQVKIRGYRIEPKEIETVMLSLSGIQEAVVLAVSEGGL
QELCAYYTSDQDIEKAELRYQLSLTLPSHMIPAFFVQVDAIPLTANGKTDRNALPKPNAAQ
SGGKALAAPETALEESLCRIWQKTLGIEAIGIDDNFFDLGGHSLKGMMLIANIQAELEKSV
PLKALFEQPTVRQLAAYMEASAVSGGHQVLKPADKQDMYPLSSAQKRMYVLNQLDRQT
ISYNMPSVLLMEGELDISRLRDSLNQLVNRHESLRTSFMEANGEPVQRIIEKAEVDLHVFE
AKEDEADQKIKEFIRPFDLNDAPLIRAALLRIEAKKHLLLLDMHHIIADGVSRGIFVKELAL
LYKGEQLPEPTLHYKDFAVWQNEAEQKERMKEHEAYWMSVLSGELPELDLPLDYARPP
VQSFKGDTIRFRTGSETAKAVEKLLAETGTTLHMVLHAVFHVFLSKISGQRDIVIGSVTAG
RTNADVQDMPGMFVNTLALRMEAKEQQTFAELLELAKQTNLSALEHQEYPFEDLVNQL
DLPRDMSRNPLFNVMVTTENPDKEQLTLQNLSISPYEAHQGTSKFDLTLGGFTDENGIGLQ
LEYATDLFAKETAEKWSEYVLRLLKAVADNPNQPLSSLLLVTETEKQALLEAWKGKALP
VPTDKTVHQLFEETVQRHKDRPAVTYNGQSWTYGELNAKANRLARILMDCGISPDDRVG
VLTKPSLEMSAAVLGVLKAGAAFVPIDPDYPDQRIEYILQDSGAKLLLKQEGISVPDSYTG
DVILLDGSRTILSLPLDENDEGNPETAVTAENLAYMIYTSGTTGQPKGVMVEHHALVNLC
FWHHDAFSMTAEDRSAKYAGFGFDASIWEMFPTWTIGAELHVIDEAIRLDIVRLNDYFET
NGVTITFLPTQLAEQFMELENTSLRVLLTGGDKLKRAVKKPYTLVNNYGPTENTVVATSA
EIHPEEGSLSIGRAIANTRVYILGEGNQVQPEGVAGELCVAGRGLARGYLNREDETAKRFV
ADPFVPGERMYRTGDLVKWVNGGIEYIGRIDQQVKVRGYRIELSEIEVQLAQLSEVQDAA
VTAVKDKGGNTAIAAYVTPETADIEALKSTLKETLPDYMIPAFWVTLNELPVTANGKVDR
KALPEPDIEAGSGEYKAPTTDMEELLAGIWQDVLGMSEVGVTDNFFSLGGDSIKGIQMAS
RLNQHGWKLEMKDLFQHPTIEELTQYVERAEGKQADQGPVEGEVILTPIQRWFFEKNFTN
KHHWNQSVMLHAKKGFDPERVEKTLQALIEHHDALRMVYREENGDIVQVYKPIGESKVS
FEIVDLYGSDEEMLRSQIKLLANKLQSSLDLRNGPLLKAEQYRTEAGDHLLIAVHHLVVD
GVSWRILLEDFASGYMQAEKEESLVFPQKTNSFKDWAEELAAFSQSAHLLQQAEYWSQI
AAEQVSPLPKDCETEQRIVKDTSSVLCELTAEDTKHLLTDVHQPYGTEINDILLSALGLTM
KEWTKGAKIGINLEGHGREDIIPNVNISRTVGWFTAQYPVVLDISDADASAVIKTVKENLR
RIPDKGVGYGILRYFTETAETKGFTPEISFNYLGQFDSEVKTDFFEPSAFDMGRQVSGESEA
LYALSFSGMIRNGRFVLSCSYNEKEFERATVEEQMERFKENLLMLIRHCTEKEDKEFTPSD
FSAEDLEMDEMGDIFDMLEENLK
SrfAC

SEQ ID NO: 45

MSQFSKDQVQDMYYLSPMQEGMLFHAILNPGQSFYLEQITMKVKGSLNIKCCLEESMNVI
MDRYDVFRTVFIHEKVKRPVQVVLKKRQFHIEEIDLTHLTGSEQTAKINEYKEQDKIRGFD
LTRDIPMRAAIFKKAEESFEWWSYHHIILDGWCFGIVVQDLFKVYNALREQKPYSLPPV
KPYKDYIKWLEKQDKQASLRYWREYLEGFEGQTTFAEQRKKQKDGYEPKELLFSLSEAE
TKAFTELAKSQHTTLSTALQAVWSVLISRYQQSGDLAFGTVVSGRPAEIKGVEHMVGLFI
NVVPRRVKLSEGITFNGLLKRLQEQSLQSEPHQYVPLYDIQSQADQPKLIDHIIVFENYPLQ
DAKNEESSENGFDMVDVHVFEKSNYDLNLMASPGDEMLIKLAYNENVFDEAFILRLKSQ
LLTAIQQLIQNPDQPVSTINLVDDREREFLLTGLNPPAQAHETKPLTYWFKEAVNANPDAP
ALTYSGQTLSYRELDEEANRIARRLQKHGAGKGSVVALYTKRSLELVIGILGVLKAGAAY
LPVDPKLPEDRISYMLADSAAACLLTHQEMKEQAAELPYTGTTLFIDDQTRFEEQASDPAT
AIDPNDPAYIMYTSGTTGKPKGNITTHANIQGLVKHVDYMAFSDQDTFLSVSNYAFDAFT
FDFYASMLNAARLIIADEHTLLDTERLTDLILQENVNVMFATTALFNLLTDAGEDWMKGL
RCILFGGERASVPHVRKALRIMGPGKLINCYGPTEGTVFATAHVVHDLPDSISSLPIGKPISN
ASVYILNEQSQLQPFGAVGELCISGMGVSKGYVNRADLTKEKFIENPFKPGETLYRTGDLA
RWLPDGTIEYAGRIDDQVKIRGHRIELEEIEKQLQEYPGVKDAVVVADRHESGDASINAYL
VNRTQLSAEDVKAHLKKQLPAYMVPQTFTFLDELPLTTNGKVNKRLLPKPDQDQLAEEW
IGPRNEMEETIAQIWSEVLGRKQIGIHDDFFALGGHSLKAMTAASRIKKELGIDLPVKLLFE
APTIAGISAYLKNGGSDGLQDVTIMNQDQEQIIFAFPPVLGYGLMYQNLSSRLPSYKLCAF
DFIEEEDRLDRYADLIQKLQPEGPLTLFGYSAGCSLAFEAAKKLEEQGRIVQRIIMVDSYKK
QGVSDLDGRTVESDVEALMNVNRDNEALNSEAVKHGLKQKTHAFYSYYVNLISTGQVK
ADIDLLTSGADFDMPEWLASWEEATTGVYRVKRGFGTHAEMLQGETLDRNAEILLEFLN
TQTVTVS

SEQ ID NO: 46

gaattcgcatgcatcgacaaaaatgtcatgaaagaatcgttgtaagacgctcttcgcaagggtgtctttttttgcctttttttcggtttttgcgcggtaca
catagtcatgtaaagattgtaaattgcattcagcaataaaaaaagattgaacgcagcagtttggtttaaaaatttttatttttctgtaaataatgtttagtg
gaaatgattgcggcatcccgcaaaaaatattgctgtaaataaactggaatctttcggcatcccgcatgaaacttttcacccatttttcggtgataaaa
acatttttttcatttaaactgaacggtagaaagataaaaaatattgaaaacaatgaataaatagccaaaattggtttcttattagggtggggtcttgcgg
tctttatccgcttatgttaaacgccgcaatgctgactgacggcagcctgctttaatagcggccatctgttttttgattggaagcactgctttttaagtgta
gtactttgggctatttcggctgttagttcataagaattaaaagctgatatggataagaaagagaaaatgcgttgcacatgttcactgcttataaagatt
aggggaggtatgacaatatggaaataactttttaccctttaacggatgcacaaaaacgaatttggtacacagaaaaattttatcctcacacgagcatt
tcaaatcttgcggggattggtaagctggtttcagctgatgcgattgattatgtgcttgttgagcaggcgattcaagagtttattcgcagaaatgacgc
catgcgccttcggttgcggctagatgaaaacggggagcctgttcaatatattagcgagtatcggcctgttgatataaaacatactgacactactga
agatccgaatgcgatagagtttatttcacaatggagccgggaggaaacgaagaaacctttgccgctatacgattgtgatttgttccgtttttccttgtt
caccataaaggaaaatgaagtgtggttttacgcaaatgttcatcacgtgatttctgatggtatctccatgaatattctcgggaatgcgatcatgcacat
ttatttagaattagccagcggctcagagacaaaagaaggaatctcgcattcatttatcgatcatgttttatctgaacaggaatatgctcaatcgaagc
ggtttgaaaaggacaaggcgttttggaacaaacaatttgaatcggtgcctgaacttgtttccttgaaacggaatgcatccgcagggggaagtttag
atgctgagaggttctctaaagatgtgcctgaagcgcttcatcagcagattctgtcgttttgtgaggcgaataaagtcagtgttctttcggtatttcaatc
gctgctcgccgcctatttgtacagggtcagcggccagaatgatgttgtgacgggaacatttatgggcaaccggacaaatgcgaaagagaagca
gatgcttggcatgtttgtttctacggttccgcttcggacaaacattgacggcgggcaggcgttttcagaatttgtcaaagaccggatgaaggatctg
atgaagacacttcgccaccaaaagtatccgtataatctcctaatcaacgatttgcgtgaaacaaagagctctctgaccaagctgttcacggtttctct
tgaatatcaagtgatgcagtggcagaaagaagaggatcttgcctttttgactgagccgattttcagcggcagcggattaaatgatgtctcaattcat
gtaaaggatcgatgggatactgggaaactcaccatagattttgattaccgcactgatttattttcacgtgaagaaatcaacatgatttgtgagcgcat
gattaccatgctggagaacgcgttaacgcatccagaacatacaattgatgaattaacactgatttctgatgcggagaagcagatgattctcaaaac
atggaacgccacaggaaaaacgtatccatatataacttttcatgagttgtttgagcagcaggcgaaaaagacgcctgatagagcggctgtcagct
atgaaggtcaaacattgacgtatcgggagcttgatgagaaaagcacacagctggccatttatttgcaggcgcatggagtgggtcctgaccgtctg
gcggggatctatgtggatcgatcgctggacatgctagtgggtttattagcgatcctcaaggctgggggagcgtatgtgccgctagacccgtccta
tccggctgaacgattagaatacatgcttgaggacagtgaagttttcattacactgacgacatcggaattagtaaatacgttgagttggaacggtgtc
acaacagcccttttagatcaagattgggatgaaattgctcaaacagcctctgatcgaaaagtgcttacacgcactgtcacgccagagaacttggc
atatgtcatttatacatccggcagcacaggaaagccaaaaggtgtcatgataccacataaagctttgacaaactttctcgtttcgatgggggaaaca
ccaggtcttacggcagaggataaaatgcttgctgtcacaacctactgttttgatattgcagctctggaattatttttgcctttaataaagggcgcacac
tgctatatttgtcaaacggagcatacaaaagacgttgaaaaactgaaacgggacatccgcgcgatcaaaccgacagtgatgcaggcaaccccc
gctacgtggaagatgctcttttattcaggctgggaaaatgaagagagcgtgaaaattttatgcggtggcgaagcattgcctgagacattaaaacga
tatttcttagatacgggcagcgaagcctggaatatgttcgggccaaccgaaacaactatctggtcagcggttcagcgcattaacgttgaatgctct
catgccacgataggaaggccaatcgccaatacacaaatctatattacggattctcagctcgcgccagtgccggcaggtgttccgggtgagctgt
gcattgcaggagacggtgtggcgaagggctactacaaaaaggaagaattaacggattcgagattcattgacaacccttttgagcctgggtctaa
gctttatagaacgggagacatggcccgttggcttacgggagggcgaattgaatatataggccgcatcgataatcaagtaaaaatccgcggattc
cgtattgaacttggtgatattgaaagcaggcttagtgagcatcccggcattctggaatgcgttgtggtcgcagatatggataacctagctgcctatta
tacagctaaacatgcaaatgcttctctcacagcgagagagctgcgtcattttgtgaaaaacgctttgcctgcctatatggtgccttcttattttattcag
cttgatcatatgccgttaactccgaacggaaagatagatagaaacagccttaagaatatcgatttatcaggggagcagctaaagcaaaggcaga
cctctcctaagaacattcaggatactgtttttaccatttggcaggaagtgctgaaaacgagtgacattgaatgggatgacttctttgcgctcggagg
gcattccttgaaggccatgaccgccgcgtcccgcatcaagaaagagctcgggattgatcttccagtgaagcttttgtttgaagcgccgacgatcg
ccggcatttcagcgtatttgaaaaacgggggctctgatggcttgcaggatgtaacgataatgaatcaggatcaggagcagatcattttcgcatttcc
gccggttctgggctatggccttatgtaccaaaatctgtccagccgcttgccgtcatacaagctatgcgcctttgattttattgaggaggaagaccgg
cttgaccgctatgcggatttgatccagaagctgcagccggaagggcctttaacattgtttggatattcagcgggatgcagcctggcgtttgaagct
gcgaaaaagcttgaggaacaaggccgtattgttcagcggatcatcatggtggattcctataaaaaacaaggtgtcagtgatctggacggacgca
cggttgaaagtgatgtcgaagcgttgatgaatgtcaatcgggacaatgaagcgctcaacagcgaagccgtcaaacacggcctcaagcaaaaa
acacatgccttttactcatactacgtcaacctgatcagcacaggccaggtgaaagcagatattgatctgttgacttccggcgctgattttgacatgcc
ggaatggcttgcatcatgggaagaagctacaacaggtgtttaccgtgtgaaaagaggcttcggaacacacgcagaaatgctgcagggcgaaa
cgctagataggaatgcggagattttgctcgaatttcttaatacacaaaccgtaacggtttcataaatgaagtgatgaaaggaggagacagccaatg
agccaactcttcaaatcatttgatgcgtcggaaaaaacacagctcatctgttttccgtttgccggcggctattcggcgtcgtttcgccctctccatgct
tttttgcagggggagtgcgagatgctcgctgccgagccgccgggacacggcacgaatcaaacgtcagccattgaggatctcgaagagctgac
ggatttgtacaagcaagaactgaaccttcgccctgatcggccgtttgtgctgttcggacacagtatgggcggaatgatcaccttcaggctggcgc
aaaagcttgagcgtgaaggcatctttccgcaggcggttatcatttctgcaatccagccgcctcatattcagcggaagaaagtgtcccacctgcctg
atgatcagtttctcgatcatattatccaattaggcggaatgcccgcagagcttgttgaaaataaggaggtcatgtcctttttcctgccttctttccgatc
agattaccgggctcttgaacaatttgagctttacgatctggcccagatccagtcgcctgttcatgtctttaacgggcttgatgataaaaaatgcatac
gagatgcggaagggtggaagaagtgggcaaaagacatcacattccatcaatttgacggcgggcacatgttcctgctgtcacaaacggaagaa
gtcgcagaacggatttttgcgatcttgaatcagcatccgatcattgsaaccgtgaagccgccccgcagggcgctccgcaggccgcttccggacca
ctccggaagcggccgtgcggtcggaggatcc

SEQ ID NO: 47

gaattcgcatgcatcgacaaaaatgtcatgaaagaatcgttgaagacgctcttcgcaagggtgtctttttttgcctttttttcggtttttgcgcggtaca
catagtcatgtaaagattgtaaattgcattcagcaataaaaaaagattgaacgcagcagtttggmaaaaatttttatttttctgtaaataatgtttagtg
gaaatgattgcggcatcccgcaaaaaatattgctgtaaataaactggaatctttcggcatcccgcatgaaacttttcacccatttttcggtgataaaa
acatttttttcatttaaactgaacggtagaaagataaaaaatattgaaaacaatgaataaatagccaaaattggtttcttattagggtggggtcttgcgg
tctttatccgcttatgttaaacgccgcaatgctgactgacggcagcctgctttaatagcggccatctgttttttgattggaagcactgctttttaagtgta
gtactttgggctatttcggctgttagttcataagaattaaaagctgatatggataagaaagagaaaatgcgttgcacatgttcactgcttataaagatt
aggggaggtatgacaatatggaaataactttttaccctttaacggatgcacaaaaacgaatttggtacacagaaaaattttatcctcacacgagcatt
tcaaatcttgcggggattggtaagctggtttcagctgatgcgattgattatgtgcttgttgagcaggcgattcaagagtttattcgcagaaatgacgc
catgcgccttcggttgcggctagatgaaaacggggagcctgttcaatatattagcgagtatcggcctgttgatataaaacatactgacactactga
agatccgaatgcgatagagtttatttcacaatggagccgggaggaaacgaagaaacctttgccgctatacgattgtgatttgttccgtttttccttgtt
caccataaaggaaaatgaagtgtggttttacgcaaatgttcatcacgtgatttctgatggtatctccatgaatattctcgggaatgcgatcatgcacat
ttatttagaattagccagcggctcagagacaaaagaaggaatctcgcattcatttatcgatcatgttttatctgaacaggaatatgctcaatcgaagc
ggtttgaaaaggacaaggcgttttggaacaaacaatttgaatcggtgcctgaacttgtttccttgaaacggaatgcatccgcagggggaagtttag
atgctgagaggttctctaaagatgtgcctgaagcgcttcatcagcagattctgtcgttttgtgaggcgaataaagtcagtgttctttcggtatttcaatc
gctgctcgccgcctatttgtacagggtcagcggccagaatgatgttgtgacgggaacatttatgggcaaccggacaaatgcgaaagagaagca
gatgcttggcatgtttgtttctacggttccgcttcggacaaacattgacggcgggcaggcgttttcagaatttgtcaaagaccggatgaaggatctg
atgaagacacttcgccaccaaaagtatccgtataatctcctaatcaacgatttgcgtgaaacaaagagctctctgaccaagctgttcacggtttctct
tgaatatcaagtgatgcagtggcagaaagaagaggatcttgcctttttgactgagccgattttcagcggcagcggattaaatgatgtctcaattcat
gtaaaggatcgatgggatactgggaaactcaccatagattttgattaccgcactgatttattttcacgtgaagaaatcaacatgatttgtgagcgcat
gattaccatgctggagaacgcgttaacgcatccagaacatacaattgatgaattaacactgatttctgatgcggagaagcagatgattctcaaaac
atggaacgccacaggaaaaacgtatccatatataacttttcatgagttgtttgagcagcaggcgaaaaagacgcctgatagagcggctgtcagct
atgaaggtcaaacattgacgtatcgggagcttgatgagaaaagcacacagctggccatttatttgcaggcgcatggagtgggtcctgaccgtctg
gcggggatctatgtggatcgatcgctggacatgctagtgggtttattagcgatcctcaaggctgggggagcgtatgtgccgctagacccgtccta
tccggctgaacgattagaatacatgcttgaggacagtgaagttttcattacactgacgacatcggaattagtaaatacgttgagttggaacggtgtc
acaacagcccttttagatcaagattgggatgaaattgctcaaacagcctctgatcgaaaagtgcttacacgcactgtcacgccagagaacttggc
atatgtcatttatacatccggcagcacaggaaagccaaaaggtgtcatgataccacataaagctttgacaaactttctcgtttcgatgggggaaaca
ccaggtcttacggcagaggataaaatgcttgctgtcacaacctactgttttgatattgcagctctggaattatttttgcctttaataaagggcgcacac
tgctatatttgtcaaacggagcatacaaaagacgttgaaaaactgaaacgggacatccgcgcgatcaaaccgacagtgatgcaggcaaccccc
gctacgtggaagatgctcttttattcaggctgggaaaatgaagagagcgtgaaaattttatgcggtggcgaagcattgcctgagacattaaaacga
tatttcttagatacgggcagcgaagcctggaatatgttcgggccaaccgaaacaactatctggtcagcggttcagcgcattaacgttgaatgctct
catgccacgataggaaggccaatcgccaatacacaaatctatattacggattctcagctcgcgccagtgccggcaggtgttccgggtgagctgt
gcattgcaggagacggtgtggcgaagggctactacaaaaaggaagaattaacggattcgagattcattgacaacccttttgagcctgggtctaa
gctttatagaacgggagacatggcccgttggcttacgggagggcgaattgaatatataggccgcatcgataatcaagtaaaaatccgcggattc
cgtattgaacttggtgatattgaaagcaggcttagtgagcatcccggcattctggaatgcgttgtggtcgcagatatggataacctagctgcctatta
tacagctaaacatgcaaatgcttctctcacagcgagagagctgcgtcattttgtgaaaaacgctttgcctgcctatatggtgccttcttattttattcag
cttgatcatatgccgttaactccgaacggaaagatagatagaaacagccttaagaatatcgatttatcaggggagcagctaaagcaaaggcaga
cctctcctaagaacattcaggatactgtttttaccatttggcaggaagtgctgaacgttgagaaggcggggatctttgacttctttgcgctcggagg
gcattccttgaaggccatgaccgccgcgtcccgcatcaagaaagagctcgggattgatcttccagtgaagcttttgtttgaagcgccgacgatcg
ccggcatttcagcgtatttgaaaaacgggggctctgatggcttgcaggatgtaacgataatgaatcaggatcaggagcagatcattttcgcatttcc
gccggttctgggctatggccttatgtaccaaaatctgtccagccgcttgccgtcatacaagctatgcgcctttgattttattgaggaggaagaccgg
cttgaccgctatgcggatttgatccagaagctgcagccggaagggcctttaacattgtttggatattcagcgggatgcagcctggcgtttgaagct
gcgaaaaagcttgaggaacaaggccgtattgttcagcggatcatcatggtggattcctataaaaaacaaggtgtcagtgatctggacggacgca
cggttgaaagtgatgtcgaagcgttgatgaatgtcaatcgggacaatgaagcgctcaacagcgaagccgtcaaacacggcctcaagcaaaaa
acacatgccttttactcatactacgtcaacctgatcagcacaggccaggtgaaagcagatattgatctgttgacttccggcgctgattttgacatgcc
ggaatggcttgcatcatgggaagaagctacaacaggtgtttaccgtgtgaaaagaggcttcggaacacacgcagaaatgctgcagggcgaaa
cgctagataggaatgcggagattttgctcgaatttcttaatacacaaaccgtaacggtttcataaatgaagtgatgaaaggaggagacagccaatg
agccaactcttcaaatcatttgatgcgtcggaaaaaacacagctcatctgttttccgtttgccggcggctattcggcgtcgtttcgccctctccatgct
tttttgcagggggagtgcgagatgctcgctgccgagccgccgggacacggcacgaatcaaacgtcagccattgaggatctcgaagagctgac
ggatttgtacaagcaagaactgaaccttcgccctgatcggccgtttgtgctgttcggacacagtatgggcggaatgatcaccttcaggctggcgc
aaaagcttgagcgtgaaggcatctttccgcaggcggttatcatttctgcaatccagccgcctcatattcagcggaagaaagtgtcccacctgcctg
atgatcagtttctcgatcatattatccaattaggcggaatgcccgcagagcttgttgaaaataaggaggtcatgtcctttttcctgccttctttccgatc
agattaccgggctcttgaacaatttgagctttacgatctggcccagatccagtcgcctgttcatgtctttaacgggcttgatgataaaaaatgcatac
gagatgcggaagggtggaagaagtgggcaaaagacatcacattccatcaatttgacggcgggcacatgttcctgctgtcacaaacggaagaa
gtcgcagaacggatttttgcgatcttgaatcagcatccgatcattcaaccgtgaagccgccccgcagggcgctccgcaggccgcttccggacca
ctccggaagcggccgtgcggtcggaggatcc

SEQ ID NO: 48

gaattcgcatgcatcgacaaaaatgtcatgaaagaatcgttgtaagacgctcttcgcaagggtgtcttttmgcctttttttcggtttttgcgcggtaca
catagtcatgtaaagattgtaaattgcattcagcaataaaaaaagattgaacgcagcagtttggtttaaaaatttttaltmctgtaaataatgtttagtg
gaaatgattgcggcatcccgcaaaaaatattgctgtaaataaactggaatctttcggcatcccgcatgaaacttttcacccatttttcggtgataaaa
acatttttttcatltcaactgaacggtagaaagataaaaaatattgaaaacaatgaataaatagccaaaattggtttcttattagggtggggtcttgcgg
tctttatccgcttatgttaaacgccgcaatgctgactgacggcagcctgctttaatagcggccatctgttttttgattggaagcactgctttttaagtgta
gtactttgggctatttcggctgttagttcataagaattaaaagctgatatggataagaaagagaaaatgcgttgcacatgttcactgcttataaagatt
aggggaggtatgacaatatggaaataactttttaccctttaacggatgcacaaaaacgaatttggtacacagaaaaattttatcctcacacgagcatt
tcaaatcttgcggggattggtaagctggtttcagctgatgcgattgattatgtgcttgttgagcaggcgattcaagagtttattcgcagaaatgacgc
catgcgccttcggttgcggctagatgaaaacggggagcctgttcaatatattagcgagtatcggcctgttgatataaaacatactgacactactga
agatccgaatgcgatagagtttatttcacaatggagccgggaggaaacgaagaaacctttgccgctatacgattgtgatttgttccgtttttccttgtt
caccataaaggaaaatgaagtgtggttttacgcaaatgttcatcacgtgatttctgatggtatctccatgaatattctcgggaatgcgatcatgcacat
ttatttagaattagccagcggctcagagacaaaagaaggaatctcgcattcatttatcgatcatgttttatctgaacaggaatatgctcaatcgaagc
ggtttgaaaaggacaaggcgttttggaacaaacaatttgaatcggtgcctgaacttgtttccttgaaacggaatgcatccgcagggggaagtttag
atgctgagaggttctctaaagatgtgcctgaagcgcttcatcagcagattctgtcgttttgtgaggcgaataaagtcagtgttctttcggtatttcaatc
gctgctcgccgcctatttgtacagggtcagcggccagaatgatgttgtgacgggaacatttatgggcaaccggacaaatgcgaaagagaagca
gatgcttggcatgtttgtttctacggttccgcttcggacaaacattgacggcgggcaggcgttttcagaatttgtcaaagaccggatgaaggatctg
atgaagacacttcgccaccaaaagtatccgtataatctcctaatcaacgatttgcgtgaaacaaagagctctctgaccaagctgttcacggtttctct
tgaatatcaagtgatgcagtggcagaaagaagaggatcttgcctttttgactgagccgattttcagcggcagcggattaaatgatgtctcaattcat
gtaaaggatcgatgggatactgggaaactcaccatagattttgattaccgcactgatttattttcacgtgaagaaatcaacatgatttgtgagcgcat
gattaccatgctggagaacgcgttaacgcatccagaacatacaattgatgaattaacactgatttctgatgcggagaaagaaaaagtcatttctaaa
tggaatgagacggcaaaatccgagaagctggtcagccttcaggacatgttcgaaaagcaggcagttcttacgccagaacgtatcgctctcatgt
gtgatgacattcaagtcaactatcgaaagctcaatgaagaggcaaaccgcctcgcgcgtctgttgatcgaaaaagggattggtccggagcaattt
gtcgctttggcgctgccgcgttcccctgagatggtggcttcaatgcttggtgtgctcaagactggtgcggcgtatctcccccttgatccggagtttc
cagccgaccgcatttcttacatgctggaggatgcgaaaccttcatgcatcataacgactgaggaaatagcagccagtctgcctgatgacctggct
gtacctgagcttgtgcttgatcaggctgttacacaggagattataaaacgctattcgccggaaaatcaggatgtatcggtttcgcttgaccatcctgc
gtatatcatctatacctcaggatcaacaggaagaccgaagggagtcgttgtgacacagaaaagcttaagcaattttctgctgtctatgcaggaggc
attttctctaggagaagaagacaggctgttggctgtgacgactgtcgcttttgatatttcagcattggagttatatcttccgctgattagcggagcgca
aatcgtgatcgcaaagaaagaaacgatccgtgagccgcaggcattagctcaaatgattgaaaatttcgatattaacattatgcaggcgacaccga
cactgtggcacgctttggtaacgagtgaacctgagaaacttcgggggcttagagtgcttgtaggaggcgaggcgctgccgagcggtcttttgca
ggaacttcaagaccttcattgttcagtcacgaacttatacggtcccactgaaacaacgatttggtctgccgcagcttttcttgaagaagggctgaag
ggcgttcctccgattgggaaaccgatttggaacacgcaggtgtatgtgcttgataatggattgcagccggtgccgccgggcgttgtcggagagc
tttatattgcaggaaccggcttggccagaggttatttccatcgtcctgatttaacggcggagcgcttcgttgcagatccatacggaccgccgggaa
ctcggatgtatcggaccggagaccaggcccgctggcgcgccgatgggtctttggattatatcgggcgggcggatcatcaaatcaaaattcgcg
gattccgaattgaacttggagaaattgatgccgtgcttgccaatcacccgcacattgaacaggccgcggttgtcgtacgggaagatcagccggg
agacaaacgattggcggcttatgtagtcgctgatgctgctattgatactgcagagcttcgtcgttatatgggggctagtcttcctgattatatggtacc
gtcggcgtttgtggagatggacgagctgccgttaacacctaatggcaagcttgaccggaaagcactgccggcaccagacttcagcacatctgtc
agtgatcgggccccgcggactcctcaggaagagatattgtgtgacttgtttgcagaggttctcggtttggcacgcgtcggtatcgatgacttctttg
cgctcggagggcattccttgaaggccatgaccgccgcgtcccgcatcaagaaagagctcgggattgatcttccagtgaagcttttgtttgaagcg
ccgacgatcgccggcatttcagcgtatttgaaaaacgggggctctgatggcttgcaggatgtaacgataatgaatcaggatcaggagcagatca
ttttcgcatttccgccggttctgggctatggccttatgtaccaaaatctgtccagccgcttgccgtcatacaagctatgcgcctttgattttattgagga
ggaagaccggcttgaccgctatgcggatttgatccagaagctgcagccggaagggcctttaacattgtttggatattcagcgggatgcagcctg
gcgtttgaagctgcgaaaaagcttgaggaacaaggccgtattgttcagcggatcatcatggtggattcctataaaaaacaaggtgtcagtgatctg
gacggacgcacggttgaaagtgatgtcgaagcgttgatgaatgtcaatcgggacaatgaagcgctcaacagcgaagccgtcaaacacggcct
caagcaaaaaacacatgccttttactcatactacgtcaacctgatcagcacaggccaggtgaaagcagatattgatctgttgacttccggcgctga
ttttgacatgccggaatggcttgcatcatgggaagaagctacaacaggtgtttaccgtgtgaaaagaggcttcggaacacacgcagaaatgctg
cagggcgaaacgctagataggaatgcggagattttgctcgaatttcttaatacacaaaccgtaacggtttcataaatgaagtgatgaaaggagga
gacagccaatgagccaactcttcaaatcatttgatgcgtcggaaaaaacacagctcatctgttttccgtttgccggcggctattcggcgtcgtttcg
ccctctccatgcttttttgcagggggagtgcgagatgctcgctgccgagccgccgggacacggcacgaatcaaacgtcagccattgaggatctc
gaagagctgacggatttgtacaagcaagaactgaaccttcgccctgatcggccgtttgtgctgttcggacacagtatgggcggaatgatcacctt
caggctggcgcaaaagcttgagcgtgaaggcatctttccgcaggcggttatcatttctgcaatccagccgcctcatattcagcggaagaaagtgt
cccacctgcctgatgatcagtttctcgatcatattatccaattaggcggaatgcccgcagagcttgttgaaaataaggaggtcatgtcctttttcctgc
cttctttccgatcagattaccgggctcttgaacaatttgagctttacgatctggcccagatccagtcgcctgttcatgtctttaacgggcttgatgataa
aaaatgcatacgagatgcggaagggtggaagaagtgggcaaaagacatcacattccatcaatttgacggcgggcacatgttcctgctgtcaca
aacggaagaagtcgcagaacggatttttgcgatcttgaatcagcatccgatcattcaaccgtgaagccgccccgcagggcgctccgcaggccg
cttccggaccactccggaagcggccgtgcggtcggaggatcc
(A-domain BSU)

SEQ ID NO: 49

gagaagcagatgattctcaaaacatggaacgccacaggaaaaacgtatccatatataacttttcatgagttgtttgagcagcaggcgaaaaagac
gcctgatagagcggctgtcagctatgaaggtcaaacattgacgtatcgggagcttgatgagaaaagcacacagctggccatttatttgcaggcg
catggagtgggtcctgaccgtctggcggggatctatgtggatcgatcgctggacatgctagtgggtttattagcgatcctcaaggctgggggag
cgtatgtgccgctagacccgtcctatccggctgaacgattagaatacatgcttgaggacagtgaagttttcattacactgacgacatcggaattagt
aaatacgttgagttggaacggtgtcacaacagcccttttagatcaagattgggatgaaattgctcaaacagcctctgatcgaaaagtgcttacacg
cactgtcacgccagagaacttggcatatgtcatttatacatccggcagcacaggaaagccaaaaggtgtcatgataccacataaagctttgacaa
actttctcgtttcgatgggggaaacaccaggtcttacggcagaggataaaatgcttgctgtcacaacctactgttttgatattgcagctctggaattat
ttttgcctttaataaagggcgcacactgctatatttgtcaaacggagcatacaaaagacgttgaaaaactgaaacgggacatccgcgcgatcaaa
ccgacagtgatgcaggcaacccccgctacgtggaagatgctcttttattcaggctgggaaaatgaagagagcgtgaaaattttatgcggtggcg
aagcattgcctgagacattaaaacgatatttcttagatacgggcagcgaagcctggaatatgttcgggccaaccgaaacaactatctggtcagcg
gttcagcgcattaacgttgaatgctctcatgccacgataggaaggccaatcgccaatacacaaatctatattacggattctcagctcgcgccagtg
ccggcaggtgttccgggtgagctgtgcattgcaggagacggtgtggcgaagggctactacaaaaaggaagaattaacggattcgagattcatt
gacaacccttttgagcctgggtctaagctttatagaacgggagacatggcccgttggcttacgggagggcgaattgaatatataggccgcatcga
taatcaagtaaaaatccgcggattccgtattgaacttggtgatattgaaagcaggcttagtgagcatcccggcattctggaatgcgttgtggtcgca
gatatggataacctagctgcctattatacagctaaacatgcaaatgcttctctcacagcgagagagctgcgtcattttgtgaaaaacgctttgcctgc
ctatatggtgccttcttattttattcagcttgatcatatgccgttaactccgaacggaaagatagatagaaacagccttaagaatatcgatttatcaggg
gagcagctaaagcaaaggcagacctct
(C-domain)

SEQ ID NO: 50

Cctttaacggatgcacaaaaacgaatttggtacacagaaaaattttatcctcacacgagcatttcaaatcttgcggggattggtaagctggtttcag
ctgatgcgattgattatgtgcttgttgagcaggcgattcaagagtttattcgcagaaatgacgccatgcgccttcggttgcggctagatgaaaacgg
ggagcctgttcaatatattagcgagtatcggcctgttgatataaaacatactgacactactgaagatccgaatgcgatagagtttatttcacaatgga
gccgggaggaaacgaagaaacctttgccgctatacgattgtgatttgttccgtttttccttgttcaccataaaggaaaatgaagtgtggttttacgca
aatgttcatcacgtgatttctgatggtatctccatgaatattctcgggaatgcgatcatgcacatttatttagaattagccagcggctcagagacaaaa
gaaggaatctcgcattcatttatcgatcatgttttatctgaacaggaatatgctcaatcgaagcggtttgaaaaggacaaggcgttttggaacaaac
aatttgaatcggtgcctgaacttgtttccttgaaacggaatgcatccgcagggggaagtttagatgctgagaggttctctaaagatgtgcctgaagc
gcttcatcagcagattctgtcgttttgtgaggcgaataaagtcagtgttctttcggtatttcaatcgctgctcgccgcctatttgtacagggtcagcgg
ccagaatgatgttgtgacgggaacatttatgggcaaccggacaaatgcgaaagagaagcagatgcttggcatgtttgtttctacggttccgcttcg
gacaaacattgacggcgggcaggcgttttcagaatttgtcaaagaccggatgaaggatctgatgaagacacttcgccaccaaaagtatccgtat
aatctcctaatcaacgatttgcgtgaaacaaagagctctctgaccaagctgttcacggtttctcttgaatatcaagtgatgcagtggcagaaagaag
aggatcttgcctttttgactgagccgattttcagcggcagcggattaaatgatgtctcaattcatgtaaaggatcgatgggatactgggaaactcac
catagattttgattaccgcactgatttattttcacgtgaagaaatcaacatgatttgtgagcgcatgattaccatgctggagaacgcgttaacgcatcc
agaacatacaattgatgaatta
(PCP TE-domain)

SEQ ID NO: 51

Ttctttgcgctcggagggcattccttgaaggccatgaccgccgcgtcccgcatcaagaaagagctcgggattgatcttccagtgaagcttttgttt
gaagcgccgacgatcgccggcatttcagcgtatttgaaaaacgggggctctgatggcttgcaggatgtaacgataatgaatcaggatcaggag
cagatcattttcgcatttccgccggttctgggctatggccttatgtaccaaaatctgtccagccgcttgccgtcatacaagctatgcgcctttgatttta
ttgaggaggaagaccggcttgaccgctatgcggatttgatccagaagctgcagccggaagggcctttaacattgtttggatattcagcgggatgc
agcctggcgtttgaagctgcgaaaaagcttgaggaacaaggccgtattgttcagcggatcatcatggtggattcctataaaaaacaaggtgtcag
tgatctggacggacgcacggttgaaagtgatgtcgaagcgttgatgaatgtcaatcgggacaatgaagcgctcaacagcgaagccgtcaaaca
cggcctcaagcaaaaaacacatgccttttactcatactacgtcaacctgatcagcacaggccaggtgaaagcagatattgatctgttgacttccgg
cgctgattttgacatgccggaatggcttgcatcatgggaagaagctacaacaggtgtttaccgtgtgaaaagaggcttcggaacacacgcagaa
atgctgcagggcgaaacgctagataggaatgcggagattttgctcgaatttcttaatacacaaaccgtaacggtttcataa
(A-domain DHB)

SEQ ID NO: 52

Gagaaagaaaaagtcatttctaaatggaatgagacggcaaaatccgagaagctggtcagccttcaggacatgttcgaaaagcaggcagttctta
cgccagaacgtatcgctctcatgtgtgatgacattcaagtcaactatcgaaagctcaatgaagaggcaaaccgcctcgcgcgtctgttgatcgaa
aaagggattggtccggagcaatttgtcgctttggcgctgccgcgttcccctgagatggtggcttcaatgcttggtgtgctcaagactggtgcggc
gtatctcccccttgatccggagtttccagccgaccgcatttcttacatgctggaggatgcgaaaccttcatgcatcataacgactgaggaaatagc
agccagtctgcctgatgacctggctgtacctgagcttgtgcttgatcaggctgttacacaggagattataaaacgctattcgccggaaaatcagga
tgtatcggtttcgcttgaccatcctgcgtatatcatctatacctcaggatcaacaggaagaccgaagggagtcgttgtgacacagaaaagcttaag
caattttctgctgtctatgcaggaggcattttctctaggagaagaagacaggctgttggctgtgacgactgtcgcttttgatatttcagcattggagtt
atatcttccgctgattagcggagcgcaaatcgtgatcgcaaagaaagaaacgatccgtgagccgcaggcattagctcaaatgattgaaaatttcg
atattaacattatgcaggcgacaccgacactgtggcacgctttggtaacgagtgaacctgagaaacttcgggggcttagagtgcttgtaggaggc
gaggcgctgccgagcggtcttttgcaggaacttcaagaccttcattgttcagtcacgaacttatacggtcccactgaaacaacgatttggtctgcc
gcagcttttcttgaagaagggctgaagggcgttcctccgattgggaaaccgatttggaacacgcaggtgtatgtgcttgataatggattgcagcc
ggtgccgccgggcgttgtcggagagctttatattgcaggaaccggcttggccagaggttatttccatcgtcctgatttaacggcggagcgcttcgt
tgcagatccatacggaccgccgggaactcggatgtatcggaccggagaccaggcccgctggcgcgccgatgggtctttggattatatcgggc
gggcggatcatcaaatcaaaattcgcggattccgaattgaacttggagaaattgatgccgtgcttgccaatcacccgcacattgaacaggccgc
ggttgtcgtacgggaagatcagccgggagacaaacgattggcggcttatgtagtcgctgatgctgctattgatactgcagagcttcgtcgttatat
gggggctagtcttcctgattatatggtaccgtcggcgtttgtggagatggacgagctgccgttaacacctaatggcaagcttgaccggaaagcac
tgccggcaccagacttcagcacatctgtcagtgatcgggcc

SEQ ID NO: 53

SDAEKQM

SEQ ID NO: 54

TLISDAEK

SEQ ID NO: 55

IEWDDDFFAL

SEQ ID NO: 56

RVGIDDDFFALG

SEQ ID NO: 57

WQEVLNVEKAGIF

SEQ ID NO: 58

KLLARAGGKSVSYRKDMTIPELFQEKAELLSDHPAVVFEDRTLSYRTLHEQSARIANVLK
QKGVGPDSPVAVLIERSERMITAIMGILKAGGAYVPIDPGFPAERIQYILEDCGADFILTESK
VAAPEADAELIDLDQAIEEGAEESLNADVNARNLAYIIYTSGTTGRPKGVMIEHRQVHHL
VESLQQTIYQSGSQTLRMALLAPFHFDASVKQIFASLLLGQTLYIVPKKTVTNGAALTAYY
RKNSIEATDGTPAHLQMLAAAGDFEGLKLKHMLIGGEGLSSVVADKLLKLFKEAGTAPRL
TNVYGPTETCVDASVHPVIPENAVQSAYVPIGKALGNNRLYILDQKGRLQPEGVAGELYI
AGDGVGRGYLHLPELTEEKFLQDPFVPGDRMYRTGDVVRWLPDGTIEYLGREDDQVKVR
GYRIELGEIEAVIQQAPDVAKAVVLARPDEQGNLEVCAYVVQKPGSEFAPAGLREHAARQ
LPDYMVPAYFTEVTEIPLTPSGKVDRRKLFALEVKA

SEQ ID NO: 59

SQIQQFNPGRTPYPKDKTIVQLFEEQAANTPDHTALQYEGESLTYRELNERANRLARGILS
LGAGEGRTAAVLCERSMDMIVSILAVLKSGSAYVPIDPEHPIQRMQHFFRDSGAKVLLTQ
RKLKALAEEAEFKGVIVLADEEESYHADARNLALPLDSAAMANLTYTSGTTGTPKGNIVT
HANILRTVKETNYLSITEQDTILGLSNYVFDAFMFDMFGSLLNGAKLVLIPKETVLDMARL
SRVIERENISILMITTALFHLLVDLNPACLSTLRKIMFGGERASVEHVRKALQTVGKGKLLH
MYGPSESTVFATYHPVDELEEHTLSVPIGKPVSNTEVYILDRTGHVQPAGIAGELCVSGEG
LVKGYYNRPELTEEKFVPHPFTSGERMYKTGDLARWLPNGDIEFIGRIDHQVKIRGQRIEL
GEIEHQLQTHDRVQESVVLAVDQGAGDKLLCAYYVGEGDISSQEMREHAAKDLPAYMV
PAVFIQMDELPLTGNGKIDRRALPIPDANV

SEQ ID NO: 60

ALLEAWKGKALPVPTDKTVHQLFEETAQRHKDRPAVTYNGQSWTYGELNAKANRLARI
LMDCGISPDDRVGVLTKPSLEMSAAVLGVLKAGAAFVPIDPDYPDQRIEYILQDSGAKLLL
KQEGISVPDSYTGDVILLDGSRTILSLPLDENDEENPETAVTAENLAYMIYTSGTTGQPKGV
MVEHHALVNLCFWHHDAFSMTAEDRSAKYAGFGFDASIWEMFPTWTIGAELHVIEEAIR
LDIVRLNDYFETNGVTITFLPTQLAEQFMELENTSLRVLLTGGDKLKRAVKKPYTLVNNY
GPTENTVVATSAEIHPEEGSLSIGRAIANTRVYILGEGNQVQPEGVAGELCVAGRGLARGY
LNREDETAKRFVADPFVPGERMYRTGDLVKWTGGGIEYIGRIDQQVKVRGYRIELSEIEV
QLAQLSEVQDAAVTAVKDKGGNTAIAAYVTPESADIEALKSALKETLPDYMIPAFWVTLN
ELPVTANGKVDRKALPEPDIEA

SEQ ID NO: 61

QIVEVFNSTKAELPEGMAVHQVFEEQAKRTPASTAVVYEGTKLTYRELNAAANRLARKL
VEHGLQKGETAAIMNDRSVETVVGMLAVLKAGAAYVPLDPALPGDRLRFMAEDSSVRM
VLIGNSYTGQAHQLQVPVLTLDIGFEESEAADNLNLPSAPSDLAYIMYTSGSTGKPKGVMI
EHKSILRLVKNAGYVPVTEEDRMAQTGAVSFDAGTFEVFGALLNGAALYPVKKETLLDA
KQFAAFLREQSITTMWLTSPLFNQLAAKDAGMFGTLRHLIIGGDALVPHIVSKVKQASPSL
SLWNGYGPTENTTFSTSFLIDREYGGSIPIGKPIGNSTAYIMDEQQCLQPIGAPGELCVGGIG
VARGYVNLPELTEKQFLEDPFRPGERIYRTGDLARWLPDGNIEFLGRIDNQVKVRGFRIEL
GEIETKLNMAEHVTEAAVIIRKNKADENEICAYFTADREVAVSELRKTLSQSLPDYMVPA
HLIQMDSLPLTPNGKINKKELPAPQSEA

SEQ ID NO: 62

ALLEERHMTQITEATFAALFEKQAQQTPDHSAVKAGGNLLTYRELDEQANQLAHHLRAQ
GAGNEDIVAIVMDRSAEVMVSILGVMKAGAAFLPIDPDTPEERIRYSLEDSGAKFAVVNE
RNMTAIGQYEGIIVSLDDGKWRNESKERPSSISGSRNLAYVIYTSGTTGKPKGVQIEHRNLT
NYVSWFSEEAGLTENDKTVLLSSYAFDLGYTSMFPVLLGGGELHIVQKETYTAPDEIAHYI
KEHGITYIKLTPSLFHTIVNTASFAKDANFESLRLIVLGGEKIIPTDVIAFRKMYGHTEFINH
YGPTEATIGAIAGRVDLYEPDAFAKRPTIGRPIANAGALVLNEALKLVPPGASGQLYITGQ
GLARGYLNRPQLTAERFVENPYSPGSLMYKTGDVVRRLSDGTLAFIGRADDQVKIRGYRI
EPKEIETVMLSLSGIQEAVVLAVSEGGLQELCAYYTSDQDIEKAELRYQLSLTLPSHMIPAF
FVQVDAIPLTANGKTDRNALPKPNAAQ

SEQ ID NO: 63

ALLEAWKGKALPVPTDKTVHQLFEETVQRHKDRPAVTYNGQSWTYGELNAKANRLARI
LMDCGISPDDRVGVLTKPSLEMSAAVLGVLKAGAAFVPIDPDYPDQRIEYILQDSGAKLLL
KQEGISVPDSYTGDVILLDGSRTILSLPLDENDEGNPETAVTAENLAYMIYTSGTTGQPKG
VMVEHHALVNLCFWHHDAFSMTAEDRSAKYAGFGFDASIWEMFPTWTIGAELHVIDEAI
RLDIVRLNDYFETNGVTITFLPTQLAEQFMELENTSLRVLLTGGDKLKRAVKKPYTLVNN
YGPTENTVVATSAEIHPEEGSLSIGRAIANTRVYILGEGNQVQPEGVAGELCVAGRGLARG
YLNREDETAKRFVADPFVPGERMYRTGDLVKWVNGGIEYIGRIDQQVKVRGYRIELSEIE
VQLAQLSEVQDAAVTAVKDKGGNTAIAAYVTPETADIEALKSTLKETLPDYMIPAFWVTL
NELPVTANGKVDRKALPEPDIEA

SEQ ID NO: 64

FLLTGLNPPAQAHETKPLTYWFKEAVNANPDAPALTYSGQTLSYRELDEEANRIARRLQK
HGAGKGSVVALYTKRSLELVIGILGVLKAGAAYLPVDPKLPEDRISYMLADSAAACLLTH
QEMKEQAAELPYTGTTLFIDDQTRFEEQASDPATAIDPNDPAYIMYTSGTTGKPKGNITTH
ANIQGLVKHVDYMAFSDQDTFLSVSNYAFDAFTFDFYASMLNAARLIIADEHTLLDTERL
TDLILQENVNVMFATTALFNLLTDAGEDWMKGLRCILFGGERASVPHVRKALRIMGPGK
LINCYGPTEGTVFATAHVVHDLPDSISSLPIGKPISNASVYILNEQSQLQPFGAVGELCISGM
GVSKGYVNRADLTKEKFIENPFKPGETLYRTGDLARWLPDGTIEYAGRIDDQVKIRGHRIE
LEEIEKQLQEYPGVKDAVVVADRHESGDASINAYLVNRTQLSAEDVKAHLKKQLPAYMV
PQTFTFLDELPLTTNGKVNKRLLPKPDQDQ

SEQ ID NO: 65

KVISKWNETAKSEKLVSLQDMFEKQAVLTPERIALMCDDIQVNYRKLNEEANRLARLLIE
KGIGPEQFVALALPRSPEMVASMLGVLKTGAAYLPLDPEFPADRISYMLEDAKPSCIITTEE
IAASLPDDLAVPELVLDQAVTQEIIKRYSPENQDVSVSLDHPAYIIYTSGSTGRPKGVVVTQ
KSLSNFLLSMQEAFSLGEEDRLLAVTTVAFDISALELYLPLISGAQIVIAKKETIREPQALAQ
MIENFDINIMQATPTLWHALVTSEPEKLRGLRVLVGGEALPSGLLQELQDLHCSVTNLYGP
TETTIWSAAAFLEEGLKGVPPIGKPIWNTQVYVLDNGLQPVPPGVVGELYIAGTGLARGYF
HRPDLTAERFVADPYGPPGTRMYRTGDQARWRADGSLDYIGRADHQIKIRGFRIELGEID
AVLANHPHIEQAAVVVREDQPGDKRLAAYVVADAAIDTAELRRYMGASLPDYMVPSAF
VEMDELPLTPNGKLDRKALPAPDFST

SEQ ID NO: 66

ACLPEQFEKQAALRPDAIAVVYENQELSYAELNERANRLARMMISEGVGPEQFVALALPR
SLEMAVGLLAVLKAGAAYLPLDPDYPADRIAFMLKDAQPAFIMTNTKAANHIPPVENVPK
IVLDDPELAEKLNTYPAGNPKNKDRTQPLSPLNTAYVIYTSGSTGVPKGVMIPHQNVTRLF
AATEHWFRFSSGDIWTMFHSYAFDFSVWEIWGPLLHGGRLVIVPHHVSRSPEAFLRLLVK
EGVTVLNQTPSAFYQFMQAEREQPDLGQALSLRYVIFGGEALELSRLEDWYNRHPENRPQ
LINMYGITETTVHVSYIELDRSMAALRANSLIGCGIPDLGVYVLDERLQPVPPGVAGELYV
SGAGLARGYLGRPGLTSERFIADPFGPPGTRMYRTGDVARLRADGSLDYVGRADHQVKIR
GFRIELGEIEAALVQHPQLEDAAVIVREDQPGDKRLAAYVIPSEETFDTAELRRYAAERLP
DYMVPAAFVTMKELPLTPNGKLDRKALPAPDFA

SEQ ID NO: 67

LTDAQKRIWYTEKFYPHTSISNLAGIGKLVSADAIDYVLVEQAIQEFIRRNDAMRLRLRLD
ENGEPVQYISEYRPVDIKHTDTTEDPNAIEFISQWSREETKKPLPLYDCDLFRFSLFTIKENE
VWFYANVHHVISDGISMNILGNAIMHIYLELASGSETKEGISHSFIDHVLSEQEYAQSKRFE
KDKAFWNKQFESVPELVSLKRNASAGGSLDAERFSKDVPEALHQQILSFCEANKVSVLSV
FQSLLAAYLYRVSGQNDVVTGTFMGNRTNAKEKQMLGMFVSTVPLRTNIDGGQAFSEFV
KDRMKDLMKTLRHQKYPYNLLINDLRETKSSLTKLFTVSLEYQVMQWQKEEDLAFLTEPI
FSGSGLNDVSIHVKDRWDTGKLTIDFDYRTDLFSREEINMICERMITMLENALTHPEHTIDE
LTLI

SEQ ID NO: 68

FVLENSTPRQKIHDSVDFNIEMIERGGRSDEAIMASFVRTFDLAKAPLFRIGLLGLEENRHM
LLFDMHHLISDGVSIGIMLEELARIYKGEQLPDLRLQYKDYAVWQSRQAAEGYKKDQAY
WKEVFAGELPVLQLLSDYPRPPVQSFEGDRVSIKLDAGVKDRLNRLAEQNGATLYMVML
SAYYTLLSKYTGQDDIIVGTPSAGRNHSDTEGIIGMFVNTLAIRSEVKQNETFTQLISRVRK
RVLDAFSHQDYPFEWLVEDLNIPRDVSRHPLFDTMFSLQNATEGIPAVGDLSLSVQETNFK
IAKFDLTVQARETDEGIEIDVDYSTKLFKQSTADRLLTHFARLLEDAAADPEKPISEYKLL

SEQ ID NO: 69

VSSPQKRMYVLQQLEDAQTSYNMPAVLRLTGELDVERLNSVMQQLMQRHEALRTTFEIK
DGETVQRIWEEAECEIAYFEAPEEETERIVSEFIKPFKIDQLPLFRIGLIKHSDTEHVLLFDMH
HIISDGASVGVLIEELSKLYDGETLEPLRIQYKDYAVWQQQFIQSELYKKQEEHWLKELDG
ELPVLTLPTDYSRPAVQTFEGDRIAFSLEAGKADALRRLAKETDSTLYMVLLASYSAFLSK
ISGQDDIIVGSPVAGRSQADVSRVIGMFVNTLALRTYPKGEKTFADYLNEVKETALSAFDA
QDYPLEDLIGNVQVQRDTSRNPLFDAVFSMQNANIKDLTMKGIQLEPHPFERKTAKFDLT
LTADETDGGLTFVLEYNTALFKQETIERWKQYWMELLDAVTGNPNQPLSSLSLV

SEQ ID NO: 70

LTPMQEGMLYHAMLDPHSSSYFTQLELGIHGAFDLEIFEKSVNELIRSYDILRTVFVHQQL
QKPRQVVLAERKTKVHYEDISHADENRQKEHIERYKQDVQRQGFNLAKDILFKVAVFRL
AADQLYLVWSNHHIMMDGWSMGVLMKSLFQNYEALRAGRTPANGQGKPYSDYIKWLG
KQDNEEAESYWSERLAGFEQPSVLPGRLPVKKDEYVNKEYSFTWDETLVARIQQTANLH
QVTGPNLFQAVWGIVLSKYNFTDDVIFGTVVSGRPSEINGIETMAGLFINTIPVRVKVERD
AAFADIFTAVQQHAVEAERYDYVPLYEIQKRSALDGNLLNHLVAFENYPLDQELENGSM
EDRLGFSIKVESAFEQTSFDFNLIVYPGKTWTVKIKYNGAAFDSAFIERTAEHLTRMMEAA
VDQPAAFVREYGLV

SEQ ID NO: 71

VSPAQRRMYILNQLGQANTSYNVPAVLLLEGEVDKDRLENAIQQLINRHEILRTSFDMIDG
EVVQTVHKNISFQLEAAKGREEDAEEIIKAFVQPFELNRAPLVRSKLVQLEEKRHLLLIDM
HHIITDGSSTGILIGDLAKIYQGADLELPQIHYKDYAVWHKEQTNYQKDEEYWLDVFKGE
LPILDLPADFERPAERSFAGERVMFGLDKQITAQIKSLMAETDTTMYMFLLAAFNVLLSKY
ASQDDIIVGSPTAGRTHPDLQGVPGMFVNTVALRTAPAGDKTFAQFLEEVKTASLQAFEH
QSYPLEELIEKLPLTRDTSRSPLFSVMFNMQNMEIPSLRLGDLKISSYSMLHHVAKFDLSLE
AVEREEDIGLSFDYATALFKDETIRRWSRHFVNIIKAAAANPNVRLSDVDLL

SEQ ID NO: 72

LSSAQKRMYVLNQLDRQTISYNMPSVLLMEGELDISRLRDSLNQLVNRHESLRTSFMEAN
GEPVQRIIEKAEVDLHVFEAKEDEADQKIKEFIRPFDLNDAPLIRAALLRIEAKKHLLLLDM
HHIIADGVSRGIFVKELALLYKGEQLPEPTLHYKDFAVWQNEAEQKERMKEHEAYWMSV
LSGELPELDLPLDYARPPVQSFKGDTIRFRTGSETAKAVEKLLAETGTTLHMVLHAVFHVF
LSKISGQRDIVIGSVTAGRTNADVQDMPGMFVNTLALRMEAKEQQTFAELLELAKQTNLS
ALEHQEYPFEDLVNQLDLPRDMSRNPLFNVMVTTENPDKEQLTLQNLSISPYEAHQGTSK
FDLTLGGFTDENGIGLQLEYATDLFAKETAEKWSEYVLRLLKAVADNPNQPLSSLLL

SEQ ID NO: 73

LSPMQEGMLFHAILNPGQSFYLEQITMKVKGSLNIKCLEESMNVIMDRYDVFRTVFIHEKV
KRPVQVVLKKRQFHIEEIDLTHLTGSEQTAKINEYKEQDKIRGFDLTRDIPMRAAIFKKAEE
SFEWVWSYHHIILDGWCFGIVVQDLFKVYNALREQKPYSLPPVKPYKDYIKWLEKQDKQ
ASLRYWREYLEGFEGQTTFAEQRKKQKDGYEPKELLFSLSEAETKAETELAKSQHTTLST
ALQAVWSVLISRYQQSGDLAFGTVVSGRPAEIKGVEHMVGLFINVVPRRVKLSEGITFNG
LLKRLQEQSLQSEPHQYVPLYDIQSQADQPKLIDHIIVFENYPLQDAKNEESSENGFDMVD
VHVFEKSNYDLNLMASPGDEMLIKLAYNENVFDEAFILRLKSQLLTAIQQLIQNPDQPVST
INL

SEQ ID NO: 74

SEVQKGLWTLQKMSPEKSAYHVPLCFKFSSGLHHETFQQAFGLVLNQHPILKHVIQEKDG
VPFLKNEPALSIEIKTENISSLKESDIPAFLRKKVKEPYVKENSPLVRVMSFSRSEQEHFLLV
VIHHLIFDGVSSVTFIRSLFDTYQLLLKGQQPEKAVSPAIYHDFAAWEKNMLAGKDGVKH
RTYWQKQLSGTLPNLQLPNVSASSVDSQFREDTYTRRLSSGFMNQVRTFAKEHSVNVTTV
FLSCYMMLLGRYTGQKEQIVGMPAMVRPEERFDDAIGHFLNMLPIRSELNPADTFSSFISK
LQLTILDGLDHAAYPFPKMVRDLNIPRSQAGSPVFQTAFFYQNFLQSGSYQSLLSRYADFF
SVDFVEYIHQEGEYELVFELWETEEKMELNIKYNTGLFDAASISAMFDHFVYVTEQAMLN
PSQPLKEY

SEQ ID NO: 75

LTGAQTGIWFAQQLDPDNPIYNTAEYIEINGPVNIALFEEALRHVIKEAESLHVRFGENMD
GPWQMINPSPDVQLHVIDVSSEPDPEKTALNWMKADLAKPVDLGYAPLFNEALFIAGPDR
FFWYQRIHHIAIDGFGFSLIAQRVASTYTALIKGQTAKSRSFGSLQAILEEDTDYRGSEQYE
KDRQFWLDRFADAPEVVSLADRAPRTSNSFLRHTAYLPPSDVNALKEAARYFSGSWHEV
MIAVSAVYVHRMTGSEDVVLGLPMMGRIGSASLNVPAMVMNLLPLRLTVSSSMSFSELIQ
QISREIRSIRRHHKYRHEELRRDLKLIGENHRLFGPQINLMPFDYGLDFAGVRGTTHNLSAG
PVDDLSINVYDRTDGSGLRIDVDANPEVYSESDIKLHQQRILQLLQTASAGEDMLIGQMELL

SEQ ID NO: 76

LSFAQRRLWFLHCLEGPSPTYNIPVAVRLSGELDQGLLKAALYDLVCRHESLRTIFPESQG
TSYQHILDADRACPELHVTEIAEKELSDRLAEAVRYSFDLAAEPAFRAELFVIGPDEYVLLL
LVHHIVGDGWSLTPLTRDLGTAYAARCHGRSPEWAPLAVQYADYALWQQELLGNEDDP
NSLIAGQLAFWKETLKNLPDQLELPTDYSRPAEPSHDGDTIHFRIEPEFHKRLQELARANR
VSLFMVLQSGLAALLTRLGAGTDIPIGSPIAGRNDDALGDLVGLFINTLVLRTDTSGDPSFR
ELLDRVREVNLAAYDNQDLPFERLVEVLNPARSRATHPLFQIMLAFQNTPDAELHLPDME
SSLRINSVGSAKFDLTLEISEDRLADGTPNGMEGLLEYSTDLFKRETAQALADRLMRLLEA
AESDPDEQIGNLDILAPEEHS

SEQ ID NO: 77

DTVFTIWQEVLKTSDIEWDDGFFDVGGDSLLAVTVADRIKHELSCEFSVTDLFEYSTIKNIS
QYI

SEQ ID NO: 78

EILCDLFMEVLHLPRVGIDDRFFDLGGHSLLAVQLMSRIREALGVELSIGNLFEAPTVAGL
AERL

SEQ ID NO: 79

EILCDLFAEVLGLARVGIDDSFFELGGHSLLAARLMSRIREVMGAELGIAKLFDEPTVAGL
AAHL

SEQ ID NO: 80

ETIAQIWSEVLGRKQIGIHDDFFALGGHSLKAMTAASRIKKELGIDLPVKLLFEAPTIAGISA
YL

SEQ ID NO: 81

ELLAGIWQDVLGMSEVGVTDNFFSLGGDSIKGIQMASRLNQHGWKLEMKDLFQHPTIEEL
TQYV

SEQ ID NO: 82

ESLCRIWQKTLGIEAIGIDDNFFDLGGHSLKGMMLIANIQAELEKSVPLKALFEQPTVRQLA
AY

SEQ ID NO: 83

KKLAEIWEGILGVKAGVTDNFFMIGGHSLKAMMMTAKIQEHFHKEVPIKVLFEKPTIQEL
ALYL

SEQ ID NO: 84

ELLAGIWQDVLGMSEVGVTDNFFSLGGDSIKGIQMASRLNQHGWKLEMKDLFQHPTIEEL
TQYV

SEQ ID NO: 85

QKVADIWAQVLQAEQVGAYDHFFDIGGHSLAGMKMLALVHQELGVELSLKDLFQSPTV
EGLAQVI

SEQ ID NO: 86

KAIAAIWQDVLNVEKAGIFDNFFETGGHSLKAMTLLTKIHKETGIEIPLQFLFEHPTITALAE

SEQ ID NO: 87

LTPIQRWFFEKNFTNKHHWNQSVMLHAKKGFDPERVEKTLQALIEHHDALRMVYREGQE
DVIQYNRGLEAASAQLEVIQIEGQAADYEDRIEREAERLQSSIDLQEGGLLKAGLFQAEDG
DHLLLAIHHLVVDGVSWRILLEDFAAVYTQLEQGNEPVLPQKTHSFAEYAERLQDFANSK
AFLKEKEYWRQLEEQAVAAKLPKDRESGDQRMKHTKTIEFSLTAEETEQLTTKVHEAYH
TEMNDILLTAFGLAMKEWTGQDRVSVHLEGHGREEIIEDLTISRTVGWFTSMYPMVLDM
KHADDLGYQLKQMKEDIRHVPNKGVGYGILRYLTAPEHKEDVAFSIQPDVSFNYLGQFD
EMSDAGLFTRSELPSGQSLSPETEKPNALDVVGYIENGKLTMSLAYHSLEFHEKTVQTFSD
SFKAHLLRIIEHCLSQDGTELTPSDLG

SEQ ID NO: 88

PPLFCVHPAGGLSWCYAGLMTNIGTDYPIYGLQARGIGQREELPKTLDDMAADYIKQIRT
VQPKGPYHLLGWSLGGNVVQAMATQLQNQGEEVSLLVMLDAYPNHFLPIKEAPDDEEA
LIALLALGGYDPDSLGEKPLDFEAAIEILRRDGSALASLDETVILNLKNTYVNSVGILGSYK
PKTFRGNVLFFRSTIIPEWFDPIEPDSWKPYINGQIEQIDIDCRHKDLCQPEP

SEQ ID NO: 89

DILQVGMIWK
adenylation domain of B. amyloliquefaciens

SEQ ID NO: 90

EEHMILKTWNETSREYPDACFHELFERQAAETPDACAVVYEQQQLTYRELDEKSTKLALY
LQAHGAGPDDLIGIYTDRSLHMAVGLLGILKAGGAYVPLDPSYPADRLEYMIADSRISMC
LTTADLEHSLNWGGVQTTAIDRDWSHIESTAAERTSLKRLVTPDDLAYVIYTSGSTGKPK
GVMIPHRALTNFLISMANEPGLSSEDKLLAVTTYCFDIAALELYLPLIKGAECNICKTEVTK
DARKLKELIQEYKPTIMQATPFTWKMLFHSGWSNEENVKILCGGEALSEQLKQQFLDTKS
EAWNMFGPTETTIWSAVQRITENESALTIGRPIANTRVYIMDSGLNPVLEGVPGELCIAGD
GLARGYFNKPELTDKAFVSHRLELGSKLYKTGDMARFLPGGRIEYMGRMDTQVKIRGYR
IEPGDIESRLNAHPAVQESVVVVNNHSGNEKLCAFYIRKNGEPLPSAKELRKHMKQALPA
YMAPASFVRLEELPLTPNGKVDRKLLAARDLTEKQPDT
B. amyloliquefaciens

SEQ ID NO: 91

MKSDMKASGLLKPSVSYGKSLRLSADQPMTIPEVLHKTAAAAGDQKGITYIQPDGTKVY
QTYSSLKKIALSIVKGLRQSGVKAQDEVILQLSDNSQLIPAFWGCVFLGAIPVPLAAAPAYT
EMNSGTQKLKDAWTLLNQPYVITSRDVLPEMTEWAEEQGLSGFCALAAEDLSAHEMDT
DCHHPRPEDLAMLLLTSGSTGTPKAVMLSHENIVCMVKGNIQMQGYTSEDVTFNWMPFD
HVGGIGMLHLRDVYLGCEEINIPSESILMDPLKWLDLIDHYRASVTWAPNFAFGLLADFAE
EIQTRKWDLSSMRYMLNGGEAAVAKVGRRIMELLEPHGLPANAIRPAWGMSETSSGVIFS
DEFTLENTNDDDRFVEIGLPIPGFNMRITDDRNQVVEEGEIGRFQVSGLTVTSGYYERPDL
NESVFTEDGWFETGDLGFLREGRLTITGRTKDAIIINGVNYYSHAIESAVEELPEIETSYTAA
CAVRPNQSTTDELAIFFVTSVPLDENRMTKLLHHIHQHVTQRIGVTPDYLLPVAKEDIPKT
AIGKIQRTQLKHSFEQGQFDSLHNNRQEGGNSDTASAEKEIERDFIRFLKEELSIAEELVDP
NTPFQSLGVNSIKMMKLARSIEKTYHIRLTARELHKNPTIGALAAYTAEKAANMSAEHHP
QKAEPPAERERRQTAPALSEVQKGLWTLQKMSPETTAYHVSLCFRFTSGIDKEKLKQAFQ
LVLKQHPMLKSAVNETDGGFYFIEAADPFVFSEEDISDVNETQISALIRKKVKEPFVKEGGP
LLRVQLLSKSAEEHYLLTVIHHIVFDGISSITFIHSLLDHYQALLEGKEEFTAAAPGIHPDFA
AWEKRYLAGDESKAARAYWMKQLEGDLPDLQLPPMRTDSSVPEFTEDTLTRRLPERLLN
NITAFAASRSIHLSTVMLSCYMVLLSKYTDKEDIVTGMPAMVRPEERFDGVVGHFLNMLP
IRSRAGRKETFADFVQKVQDAVLDGLDHSFYPFPKMVRDVHAKPLQNGSPVFSNAFFYQ
NFLQHSSYQSMLDEYKEFSCEFVKDIHQEGEYDLVFEMWEEASGMDLTIKYSTELFDEAG
AARLFSQFVQAAEALTANPDTPLENVSLMTKREEHMILKTWNETSREYPDACFHELFERQ
AAETPDACAVVYEQQQLTYRELDEKSTKLALYLQAHGAGPDDLIGIYTDRSLHMAVGLL
GILKAGGAYVPLDPSYPADRLEYMIADSRISMCLTTADLEHSLNWGGVQTTAIDRDWSHI
ESTAAERTSLKRLVTPDDLAYVIYTSGSTGKPKGVMIPHRALTNFLISMANEPGLSSEDKL
LAVTTYCFDIAALELYLPLIKGAECNICKTEVTKDARKLKELIQEYKPTIMQATPFTWKML
FHSGWSNEENVKILCGGEALSEQLKQQFLDTKSEAWNMFGPTETTIWSAVQRITENESAL
TIGRPIANTRVYIMDSGLNPVLEGVPGELCIAGDGLARGYFNKPELTDKAFVSHRLELGSK
LYKTGDMARFLPGGRIEYMGRMDTQVKIRGYRIEPGDIESRLNAHPAVQESVVVVNNHS
GNEKLCAFYIRKNGEPLPSAKELRKHMKQALPAYMAPASFVRLEELPLTPNGKVDRKLLA
ARDLTEKQPDTQTFSSSHIQQAVLAIWQDVLKSKDIELDDRFFDAGGDSLLAVTVTDRMT
QELDCEFSVTELFEYATVKDISRYITEQKPKEAFLAPVPQKKVNAEDREHPAGEFPDYYED
SLAVIGISCEFPGAKDHYEFWNNIKEGKESITFFSKEELRRSGISEELADHPGFVPAKSVLEG
KEMFDPGFFGFSPKDAEYMDPQLRMLLLHSWKAIEDAGYISKEIPETSVYMSASTNSYRSL
LPEETTAQLETPDGYVSWVLAQSGTIPTMISHKLGLKGPSYFVHANCSSSLIGLHSAFQSLQ
SGEAKYALVGGATLHTESSAGYVHQPGLNFSSDGHIKAFDADADGMIGGEGAGAVLLKK
ASDAVKDGDHIYALLRGIGVNNDGADKVGFYAPSVKGQAEVIQKVIDQTGIHPETIAYVE
AHGTGTKLGDPIELSALQSVYGRYTDKKQYCGIGSVKTNLGHLDTAAGMAGCIKVVMSL
YHQEIAPSINYKEPNPNLHLEDSPFFVAEEKKELTRENRAHRMALSSFGLGGTNTHAIFEQ
YPDASEAADAAGPFIIPLSARKKDRLKEYAKQLLAFLERKTDTDLADLAYTFQVGREAME
ERAAFITSGTAELKRQLADFINDKPAVTGCFRGEKQQAKDIAWLSDDDDSAELIEKWLAK
GKGPKLCEMWSKGVAINWHKLYKDKHPKRISLPVYPFAKEPYWPKKAEKNTSAAHTGV
SVLHPLVQQNTSDLAVQRFSSRFTGSEFFLKDHVVREKAVLPGAAYLEMSYEAVKRALG
GLLKDQDRITLHHTIWMKPIVVHEQERQVHIALFPEEDGIISYDIYSVNADGEEVLHSQGR
AEIIKAEREPEADLSAIQNRCTADILDPAAFYREGRSRGMFHGKAFQGIKSAFIGEKEVLSDI
QLPDSVSHTNGQFTLHPSIIDSAIQTATICIMQEFSGQKLILPFALEYLEVIKACTPTMRAHA
RFSDGYQTGNSVQKADIDLFDETGALCVKVRGFSTRVLEGDAESAQPPSGSEKVLFAPVW
KEAAASEKASVRADEHLIILCEDACRIKDETASGLKDAELLIAEGEGETAAERFQSYAQTIA
EHIRRIISEKRQGRILIQTVISADGSQQLFAGLTGLLKTAELEYGKLDCQLIEMESIGEMPAV
AQKLKNDSHQPHDKHIRYKGEKRYVKAWEEMHPAGGGIVWKDEGVYLITGGAGSLGLM
VAKEIAGRVKHPKIILTGRSNLTEAKQRELAMLQHSGANVVYKKLNAADRRENEAMIKEI
TAEFGKLNGIIHAAGVIQDRFLLQKTKEEFREVLDPKVIGTAYLDEASKDCNLDFFVLFSSV
SGVLGNVGQADYAAGNAFMDAYAAYRQSLTENGLRHGKTVAFNWTLWKDGGMQAGD
ETERMMKKAFGMVPLQKASGLAAFYEGMAQEKPQLLAAEGHAAKLKQSFLSVSETEKP
QVKKIEPVSAVSGDKWHGALIRLVSSILKVGQDEIDIDTELSEYGFDSVSFTVFTNQLNEAY
QLKLAPTIFFEHGTIRSLADYLTDEAEAGLPSQPEEKHDADKSLQTLHTALTAMVSGILKV
DREDIETDTELSEYGFDSVSFTVFTNQLNEAYQLELAPTIFFEHGTISGLAGYLAKEHPGRF
GEKKKESPKKEQPKAQKPKMQRKKRFATVMNASAATQEPRRFDPVAIVGISGRFPGAKDI
EEFWRNLKEGKDSITTIPKERWDWQAFDGDPNLEGNKTNIKWGGFIDGIAEFDPLFFGISP
REAQYLDPQQRLLLTYAWRAIEDAGCKPESLSGTNTGVFIGTGNTGYKDLFTRAGLAPEG
HAATGSMIPSIGPNRLSYLLNLHGPSEPIETACSSSLVAIHRAVSAIENGECDMAIAGGINTIL
TEEAHISYSKAGMLSKDGKCKTFSKDANGYVRGEGAGILMLKKLSDAERDGNPIYGVIRG
TAENHGGRANTLTSPNPKLQADLLVKAYRKAGVDPSTVTYIEAHGTGTELGDPIEINGLK
AAFHELAKTNQEPEVSGHRCGIGSVKSNIGHLELAAGVSGVMKVLLQMKHKTLVKSLHC
ETINPYIQLDDSPFYIVRENQEWTAAKDRNGNAIPRRAGVSSFGIGGVNAHIVIEEYVPKAA
AQPEHSPENPAIILLSAKSKEKLFEQAQQLQKAIRQTPYTDQDLAGVAYTLQTGRDEMEER
LAILAATMAELETKLEAFTKNEKNIAGLYTGQSHRNKDTFALFTADEDMDIVIDAWIKKG
KFAKLAEVWVKGGVFNWNRLYEKGTPRLLSLPSYPFAKDTYWVPENPDKNKVHTEERM
KRILTKQWELSPLELREPCARSVAILTGGDTINLAEEIAAHMPNHRIITASDLSGEYDWQAF
DGVIDLLGAAKEDSQDMAGIKWLQQLIEHGHKEGMTLLCVTKDLESLNKEANQTTGAKR
AGLYRMLAYEYGHLSSRHLDLEGALSDDKLAKQIADEFHARTDDAEVCRRDGLRYRAVL
SGAENMNMKGERIDFPDNHVLLITGGTRGIGLLCARHFAEHYGVKKLVLTGRETLPPRSE
WTGGLNGVPASVKAKIEAVLDLESKGVQVKVLSVPLADEAGLRQELSQIKQTLGPIGGVI
HCAGVTDKETLAFIRKTDEDIQRVLEPKVDGLQALYSVLSEEPLKFFVLFSSVSAAIPALSA
GQADYAMANAYMDYFANSYKEQLPIVSIQWPNWKETGMGEVTNKAYKESGLYSITNAE
GLQLLDGILLESARGPVLPAVLNPKLWKPERFLRRSRQDQPMSPAMVKPAEKTAYTAENN
TQLTRKTEEWLKELFSEELRIDQDQLETDVLFQDYGVDSIILAQLLQRINRNLSASLDPSILY
EYPTIQSFANWLLEGYTEVLSERFDLAAEPVKKNPAEPVIETQAVKVQEEPAGKQIHREDI
AVVGMSCRFPGAASLEAYWSLLAEGRSAIRPVPAERWGLKTPYYAGMLDGIHQFDPDFF
LLAEEDVKAMDPQALAALEECLNLWYHAGYTPDEIKGEAIGVYLGGRSRHRPGEDKLLD
AKNPIVALGQNYLAANLSQYFDMRGPSVVLDTACSSALVGMNMAVQALVSGEIKAAVV
GGVSLFESEETHKLFEQRGILSKAQSFHVFDERADGVVLGEGVGMVLLKTVSQAIEDGDSI
YAVVKAASVNNDGRTAGPATPSLEAQKSVMKTALEKSGKQPEDITHIEANGSGTVVTDL
LELKAIQSVYRSKDAGPLGIGSVKPNIGHPLCAEGIASFIKVVLMLKEKSFIPFLSGEHENTH
FDREKANIQFSRTLADWPSPIPAAGINCFADGGTNAHVIVEAWQEDEGRRIKRHPLTPPAL
NKRLISPDSKEETNEKAAANIWDTYEVEV
S. roseosporous dptA

SEQ ID NO: 92

TDDERDRILGDWGSGTHTPLPPRSVAEQIVRRAALDPDAVAVITAEEELSYRELERLSGE
TARLLADRGIGRESLVAVALPRTAGLVTTLLGVLRTGAAYLPLDTGYPAERLAHVLSDA
RPDLVLTHAGLAGRLPAGLAPTVLVDEPQPPAAAAPAVPTSPSGDHLAYVIHTSGSTGR
PKGVAIAESSLRAFLADAVRRHDLTPHDRLLAVTTVGFDIAGLELFAPLLAGAAIVLADE
DAVRDPASITSLCARHHVTVVQATPSWWRAMLDGAPADAAARLEHVRILVGGEPLPAD
LARVLTATGAAVTNVYGPTEATIWATAAPLTAGDDRTPGIGTPLDNWRVHILDAALGP
VPPGVPGEIHIAGSGLARGYLRRPDLTAERFVANPFAPGERMYRTGDLGRFRPDGTLEH
LGRVDDQVKVRGFRIELGDVEAALARHPDVGRAAAAVRPDHRGQGRLVAYVVPRPGT
RGPDAGELRETVRELLPDYMVPSAQVTLTTLPHTPNGKLDRAALPAPVFGTPAGR
adenylation domain of S. roseosporous

SEQ ID NO: 93

MDMQSQRLGVTAAQQSVWLAGQLADDHRLYHCAAYLSLTGSIDPRTLGTAVRRTLDET
EALRTRFVPQDGELLQILEPGAGQLLLEADFSGDPDPERAAHDWMHAALAAPVRLDRAG
TATHALLTLGPSRHLLYFGYHHIALDGYGALLHLRRLAHVYTALSNGDDPGPCPFGPLAG
VLTEEAAYRDSDNHRRDGEFWTRSLAGADEAPGLSEREAGALAVPLRRTVELSGERTEKL
AASAAATGARWSSLLVAATAAFVRRHAAADDTVIGLPVTARLTGPALRTPCMLANDVPL
RLDARLDAPFAALLADTTRAVGTLARHQRFRGEELHRNLGGVGRTAGLARVTVNVLAY
VDNIRFGDCRAVVHELSSGPVRDFHINSYGTPGTPDGVQLVFSGNPALYTATDLADHQER
FLRFLDAVTADPDLPTGRHRLLSPGTRARLLDDSRGTERPVPRATLPELFAEQARRTPDAP
AVQHDGTVLTYRDLHRSVERAAGRLAGLGLRTEDVVALALPKSAESVAILLGIQRAGAA
YVPLDPTHPAERLARVLDDTRPRYLVTTGHIDGLSHPTPQLAAADLLREGGPEPAPGRPAP
GNAAYIIQTSGSTGRPKGVVVTHEGLATLAADQIRRYRTGPDARVLQFISPGFDVFVSELS
MTLLSGGCLVIPPDGLTGRHLADFLAAEAVTTTSLTPGALATMPATDLPHLRTLIVGGEVC
PPEIFDQWGRGRDIVNAYGPTETTVEATAWHRDGATHGPVPLGRPTLNRRGYVLDPALEP
VPDGTTGELYLAGEGLARGYVAAPGPTAERFVADPFGPPGSRMYRTGDLVRRRSGGMLE
FVGRADGQVKLRGFRIELGEVQAALTALPGVRQAGVLIREDRPGDPRLVGYIVPAPGAEP
DAGELRAALARTLPPHMVPWALVPLPALPLTSNGKLDRAALPVPAARAGGSGQRPVTPQ
EKTLCALFADVLGVTEVATDDVFFELGGHSLNGTRLLARIRTEFGTDLTLRDLFAFPTVAG
LLPLLDDNGRQHTTPPLPPRPERLPLSHAQQRLWFLDQVEGPSPAYNIPTAVRLEGPLDIPA
LAVALQDVTNRHEPLRTLLAEDSEGPHQVILPPEAARPELTHSTVAPGDLAAALAEAARR
PFDLAGEIPLKAHLFGCGPDDHTLLLLVHHTAGDGASVEVLVRDLAHAYGARRAGDAPH
FEPLPLQYADHTLRRRHLLDDPSDSTQLDHWRDALAGLPEQLELPTDHTRPAVPTRRGEAI
AFTVPEHTHHTLRAMAQAHGVTVFMVMQAALAALLSRHGAGHDIPLGTPVAGRSDDGT
EDLVGFFVNTLVLRNDVSGDPTFAELVSRVRAANLDAYAYQDVPFERLVDVLKPERSLS
WHPLFQIMIAYNGPATNDTADGSRFAGLTSRVHAVHTGMSKFDLSFFLTEHADGLGIDGA
LEFSTDLFTRITAERLVQRYLTVLEQAAGAPDRPISSYELLGDDERALLAQWNDTAHPTPP
GTVLDLLESRAARTPDRPAVVENDHVLTYADLHTRANRLARHLITAHGVGPERLVAVAL
PRSAELLVALLAVLKTGAAYVPLDLTHPAERTAVVLDDCRPAVILTDAGAARELPRRDIP
QLRLDEPEVHAAIAEQPGGPVTDRDRTCVTPVSGEHVAYVIYTSGSTGRPKGVAVEHRSL
ADFVRYSVTAYPGAFDVTLLHSPVTFDLTVTSLFPPLVVGGAIHVADLTEACPPSLAAAGG
PTFVKATPSHLPLLTHEATWAASAKVLLVGGEQLLGRELDKWRAGSPEAVVFNDYGPTE
ATVNCVDFRIDPGQPIGAGPVAIGRPLRNTRVFVLDGGLRAVPVGVVGELHVAGEGLARG
YLGQPGLTAERFVACPFGDAGERMYRTGDLVRWRADGMLEFVGRVDDQVKVRGFRIEL
GEVEAAVAACPGVDRSVVVVREDRPGDRRLVAYVTAAGDEAEGLAPLIVETAAGRLPGY
MVPSAVVVLDEIPLTPNGKVDRAALPAPRVAPAAEFRVTGSPREEALCALFAEVLGVERV
GVDDGFFDLGGDSILSIQLVARARRAGLEVSVRDVFEHRTVRALAGVVRESGGVAAAVV
DSGVGAVERWPVVEWLAERGGGGLGGAVRAFNQSVVVATPAGITWDELRTVLDAVRER
HDAWRLRVVDSGDGAWSLRVDAPAPGGEPDWITRHGMASADLEEQVNAVRAAAVEAR
SRLDPLTGRMVRAVWLDRGPDRRGVLVLVAHHLVVDGVSWRIVLGDLGEAWTQARAG
GHVRLDTVGTSLRGWAAALAEQGRHGARATEANLWAQMVHGSDPLVGPRAVDPSVDV
FGVVESVGSRASVGVSRALLTEVPSVLGVGVQEVLLAAFGLAVTRWRGRGGSVVVDVEG
HGRNEDAVPGADLSRTVGWFTSIYPVRLPLEPAAWDEIRAGGPAVGRTVREIKECLRTLP
DQGLGYGILRYLDPENGPALAQHPTPHFGFNYLGRVSVSADAASLDEGDAHADGLGGLV
GGRAAADSDEEQWADWVPVSGPFAVGAGQDPVLPVAHAVEFNAITLDTPDGPRLSVTW
SWPTTLLSESRIRELARFWDEALEGLVAHARRPDAGGLTPSDLPLVALDHAELEALQADV
TGGVHDILPVSPLQEGLLFHSSFAADGVDVYVGQLTFDLTGPVDADHLHAVVESLVTRHD
VLRTGYRQAQSGEWIAVVARQVHTPWQYIHTLDTDADTLTNDERWRPFDMTQGPLARF
TLARINDTHFRFIVTYHHVILDGWSVAVLIRELFTTYRDTALGRRPEVPYSPPRRDFMAWL
AERDQTAAGQAWRSALAGLAEPTVLALGTEGSGVIPEVLEEEISEELTSELVAWARGRGV
TVASVVQAAWALVLGRLVGRDDVVFGLTVSGRPAEVAGVEDMVGLFVNTIPLRARMDP
AESLGAFVERLQREQTELLEHQHVRLAEVQRWAGHKELFDVGMVFENYPMDSLLQDSLF
HGSGLQIDGIQGADATHFALNLAVVPLPAMRFRLGYRPDVFDAGRVRELWGWIVRALEC
VVCERDVPVSGVDVLGAGERETLLGWGAGAEPGVRALPGAGAGAGAGLVGLFEERVRT
DPDAVAVRGAGVEWSYAELNARANAVARWLIGRGVGPERGVGVVMDRGPDVVAMLL
AVAKSGGFYLPVDPQWPTERIDWVLADAGIDLAVVGENLAAAVEAVRDCEVVDYAQIA
RETRLNEQAATDAGDVTDGERVSALLSGHPLYVIYTSGSTGLPKGVVVTHASVGAYLRR
GRNAYRGAADGLGHVHSSLAFDLTVTVLFTPLVSGGCVTLGDLDDTANGLGATFLKATP
SHLPLLGQLDRVLAPDATLLLGGEALTAGALHHWRTHHPHTTVINAYGPTELTVNCAEY
RIPPGHCLPDGPVPIGRPFTGHHLFVLDPALRLTPPDTIGELYVAGDGLARGYLGRPDLTAE
RFVACPFRSPGERMYRTGDLARWRSDGTLEFIGRADDQVKIRGFRIELGEVEAAVAAHPH
VARAIAVVREDRPGDQRLVAYVTGSDPSGLSSAVTDTVAGRLPAYMVPSAVVVLDQIPLT
PNGKVDRAALPAPGTASGTTSRAPGTAREEILCTLFADVLGLDQVGVDEDFFDLGGHSLL
ATRLTSRIRSALGIDLGVRALFKAPTVGRLDQLLQQQTTSLRAPLVARERTGCEPLSFAQQ
RLWFLHQLEGPNAAYNIPMALRLTGRLDLTALEAALTDVIARHESLRTVIAQDDSGGVW
QNILPTDDTRTHLTLDTMPVDAHTLQNRVDEAARHPFDLTTEIPLRATVFRVTDDEHVLLL
VLHHIAGDGWSMAPLAHDLSAAYTVRLEHHAPQLPALAVQYADYAAWQRDVLGTENN
TSSQLSTQLDYWYSKLEGLPAELTLPTSRVRPAVASHACDRVEFTVPHDVHQGLTALART
QGATVFMVVQAALAALLSRLGAGTDIPIGTPIAGRTDQAMENLIGLFVNTLVLRTDVSGD
PTFAELLARVRTTALDAYAHQDIPFERLVEAINPERSLTRHPLFQVMLAFNNTDRRSALDA
LDAMPGLHARPADVLAVTSPYDLAFSFVETPGSTEMPGILDYATDLFDRSTAEAMTERLV
RLLAEIARRPELSVGDIGILSADEVKALSPEAPPAAEELHTSTLPELFEEQVAARGHAVAVV
CEGEELSYKELNARANRLARVLMERGAGPERFVGVALPRGLDLIVALLAVTKTGAAYVP
LDPEYPTDRLAYMVTDANPTAVVTSTDVHIPLIAPRIELDDEAIRTELAAAPDTAPCVGSGP
AHPAYVIYTSGSTGRPKGVVISHANVVRLFTACSDSFDFGPDHVWTLFHSYAFDFSVWEI
WGALLHGGRLVVVPFEVTRSPAEFLALLAEQQVTLLSQTPSAFHQLTEAARQEPARCAGL
ALRHVVFGGEALDPSRLRDWFDLPLGSRPTLVNMYGITETTVHVTVLPLEDRATSLSGSPI
GRPLADLQVYVLDERLRPVPPGTVGEMYVAGAGLARGYLGRPALTAERFVADPNSRSGG
RLYRTGDLAKVRPDGGLEYVGRGDRQVKIRGFRIELGEIEAALVTHAGVVQAVVLVRDE
QTDDQRLVAHVVPALPHRAPTLAELHEHLAATLPAYMVPSAYRTLDELPLTANGKLDRA
ALAGQWQGGTRTRRLPRTPQEEILCELFADVLRLPAAGADDDFFALGGHSLLATRLLSAV
RGTLGVELGIRDLFAAPTPAGLATVLAASGTALPPVTRIDRRPERLPLSFAQRRLWFLSKLE
GPSATYNIPVAVRLTGALDVPALRAALGDVTARHESLRTVFPDDGGEPRQLVLPHAEPPFL
THEVTVGEVAEQAASATGYAFDITSDTPLRATLLRVSPEEHVLVVVIHHIAGDGWSMGPL
VRDLVTAYRARTRGDAPEYTPLPVQYADYALWQHAVAGDEDAPDGRTARRLGYWREM
LAGLPEEHTLPADRPRPVRSSHRGGRVRFELPAGVHRSLLAVARDRRATLFMVVQAALA
GLLSRLGAGDDIPIGTPVAGRGDEALDDVVGFFVNTLVLRTNLAGDPSFADLVDRVRTAD
LDAFAHQDVPFERLVEALAPRRSLARHPLFQIWYTLTNADQDITGQALNALPGLTGDEYP
LGASAAKFDLSFTFTEHRTPDGDAAGLSVLLDYSSDLYDHGTAAALGHRLTGFFAALAAD
PTAPLGTVPLLTDDERDRILGDWGSGTHTPLPPRSVAEQIVRRAALDPDAVAVITAEEELS
YRELERLSGETARLLADRGIGRESLVAVALPRTAGLVTTLLGVLRTGAAYLPLDTGYPAE
RLAHVLSDARPDLVLTHAGLAGRLPAGLAPTVLVDEPQPPAAAAPAVPTSPSGDHLAYVI
HTSGSTGRPKGVAIAESSLRAFLADAVRRHDLTPHDRLLAVTTVGFDIAGLELFAPLLAGA
AIVLADEDAVRDPASITSLCARHHVTVVQATPSWWRAMLDGAPADAAARLEHVRILVGG
EPLPADLARVLTATGAAVTNVYGPTEATIWATAAPLTAGDDRTPGIGTPLDNWRVHILDA
ALGPVPPGVPGEIHIAGSGLARGYLRRPDLTAERFVANPFAPGERMYRTGDLGRFRPDGTL
EHLGRVDDQVKVRGFRIELGDVEAALARHPDVGRAAAAVRPDHRGQGRLVAYVVPRPG
TRGPDAGELRETVRELLPDYMVPSAQVTLTTLPHTPNGKLDRAALPAPVFGTPAGRAPAT
REEKILAGLFADILGLPDVGADSGFFDLGGDSVLSIQLVSRARREGLHITVRDVFEHGTVG
ALAAAALPAPADDADDTVPGTDVLPSISDDEFEEFELELGLEGEEEQW
S. roseosporous dptBC

SEQ ID NO: 94

AGERDQLLHEWNDTAAALPPALLPQLFEEQVRRTPHDVALVSGNIRLTYAELDARANR
LAHLLLARGAAPETFVAVALPRTEELLVALLAVQKTGAGHLPLDPGFPAERLSYMLDD
ARPAVVLTTEDISARIPGGSHVVLDSEQVTGELHDHPATSPAGRGNPAGPAYVIYTSGST
GQPKGVVVPSAALVNFLADMVPRLGLRGGDRLLSVTTVGFDIAALELFVPLLSGATVVL
ADGETVRDPALARQTCEDHGVTMVQATPSWWHGMLADAGDSLRGVHAVVGGEALSP
GLRDALTRGARSVTNMYGPTETTIWSTSAGQAAGDSAPPSIGTPILNTRVYVLDAALCV
VPPGVAGELYIAGDGLARGYLGRAGLTAERFVACPFGAPGERMYRTGDLVRWRVDGA
LEFVGRADDQVKVRGFRVELGEVEGAVAAHPDVVRAVVVVREDRPGDHRLVAYVTG
VDTGGLSSAVMRAVAERLPAYMVPSAVVVLDEIPLTPNGKVDRAALPVPGVEAGAGYR
adenylation domain of S. roseosporous

SEQ ID NO: 95

MNRRSKVVEEILPVSALQEGLLFHSSFAAADGVDVYAGQLAFDLVGAVDTGRLRAAVES
LVARHGVLRSSYRQARSGEWVAVVARRVATPWRAVDARDGATDAAAVAREERWRPFD
LGRAPLARFVLVRTDDDRFRFVITYHHVILDGWSLPVLLRELLALYGSGADPSVLPPVRPY
GDFLRWAAARDDAAAETAWRDALTGLDEPSLVAPGASPDGVVPASVHAELDKAGTENL
AAWARHRGITQATAVRAAWALVLGQHTGRDDVVFGVTVSGRPAELAGAEHMVGLFINT
VPLRTVLDPADTLGTFAARLQAEQTTLLEHQHVRLSDIQRWAGHKELFDTIVVFENYPIGH
SGPGSIRTDDFTVTATEGSDATHYPLTLTAVPGETLRLKLDHRPDLVDTTTATALLRRVTR
VLETATDDTGHTLARLDLLDDDERHRLLRGWNDTTREQPPTYYHQEFEEQARRRPHDTA
LVFTSTSWTYEELNDRANRLARLLVAAGAGSDDFVALAFPRSAESVVAILAVLKAGAAY
LPLDMDQPAERLTGILADAHPTVVLTTTTATPLPHPGRTLVLDSPTTARALAAAPAHNLTD
ADRRTPLNARNAAYIIHTSGSTGRPKGVVIEHRSLANLFHDHRRALIEPHAAGGSRLKAGL
TASLSFDTSWEGLICLAAGHELHLIDDDTRRDAERVAELIDRQRIDVIDVTPSFAQQLVETG
ILDEGRHHPAAFMLGGEGVDAKLWTRLSDVPGVTSYNYYGPTEFTVDALACTVGIAPRP
VIGHPLDNTAAYILDGFLRPVPEGVAGELYLAGTQLARGYAGRPGLTAERFVACPFGAPG
ERMYRTGDLVRRSPGGVVEYLGRVDDQIKLRGFRIEPAEIELALAGHPAVAQNVVLLHRS
ATGEARLVAYVVPGTPVDPRELTGHLAARLPAYMVPSAFVLLDTLPLTPNGKLDRGALPE
PAFGTAPRPERPRTPVEEILCGLYADVLGLPSFGADDDFFDAGGHSLLASKLVSRIRTNLKT
ELNVRALFEHRTVSSLATALHRAAQAGPALTAGPRPARIPLSYAQRRLWFLNRLDRDSAA
YNMPVALRLRGPLDSTAMCAALTDVAERHEALRTVFEEDRDGAHQIVLPATGLGPLLTV
TGADGTTLRALITEFVRRPFDLAAEIPFRAALFRVGDEEHVLVVVLHHIAGDGWSMGPLA
RDVAEAYRARAAGRAPDWEPLPVQYADYALWQREVLGAEDDETGELSAQLAHWRTRL
AGAPAELTLPTDRPRPAVASTAGDRVEFTVPAGLHQALADLARAHGATVFMVVQAALA
VLLSRLGAGDDIPIGTPVAGRTDEATEELIGFFVNTLVLRTDVSGDPTFAELLARVRATDL
DAYAHQDVPFERLVEVLNPERSLARHPLFQVMLTFNVPDMDGVGSALGNLGELEVSGEA
IRTDQTKVDLAFTCTEMYAADGAASGMRGVLEYRLDVFGAVQARETTERLVRVLEGVVS
GGGGVSVSGVDVLGVGERERLLGWGVGGPVPVVPGGGLVGLFEERVRADADAVAVRG
AGVVWSYGELNARVNVVARWLVGRGVGAECGVGVVMGRGVDVVVMLLAVAKAGGF
YVPVDPEWPVERVGWVLADAGVGLVVVGEGLSHVVGDFPGGEVFEFSRVVRESCLVEL
VAADGVEVRNVTDGERASRLLPGHPLYVVYTSGSTGRPKGVVVTHASVGGYLARGRDV
YAGAVGGVGFVHSSLAFDLTVTVLFTPLVSGGCVVLGELDESAQGVGASFVKVTPSHLGL
LGELEGVVAGNGMLLVGGEALSGGALREWRERNPGVVVVNAYGPTELTVNCAEFLIAPG
EEVPDGPVPIGRPFAGQRMFVLDAALRVVPVGVVGELYVAGVGLARGYLGRAGLTAERF
VACPFGAPGERMYRTGDLVRWRVDGALEFVGRADDQVKVRGFRVELGEVEGAVAAHP
DVVRAVVVVREDRPGDHRLVAYVTGVDTGGLSSAVMRAVAERLPAYMVPSAVVVLDEI
PLTPNGKVDRAALPVPGVEAGAGYRAPVSPREEVLCGLFAEVLGLERVGVDDDFFGLGG
HSLLATRLISRVRAVLGVEAGVRALFEAPTVSRLERLLRERSALGVRVPLVARERTGREPL
SFAQQRLVVFLEELEGPGAAYNIPMALRLAGVLDVEALHQALIDVIARHESLRTLIAQDAG
TAWQHILPVDDPRTRPGLPLVDIGADALQERLDEAAGRPFDLAADLPVRATVFRLTDNDH
ILLVVAHHVAFDAMSRVPFIRNVKRAFEARTNGAAPDWRPLPVQYADYAAWQRDVLGT
EDDESSELSAQLAYWRTQLASLPAELALPTDRARPAVASYEGGKVEFTVPAGVYDGLVA
LARAEGVTVFMVVQAALAALLSRLGAGDDIPIGTPIAGRTDQATEDLIGFFVNTLVLRTDV
SGDPTFAELLARVRATDLDAYAHQDIPFERLVEAVNPERSLARHPLFQVMLTFDNTIDREV
TEGFAGLGVEGLPLGAGAVKFDLLFGLSEVGGELRGAVEYRCDLFDHPTVAQLAERLVR
VLERVASDASVRTGELPVVGEAERARVLTEWNDTGVPGVPETFLELFEAQVAARGDAPA
VVYEGEVLSYRELDARANRLAGLLVGRGAGPEHFVGVALPRGLDLIVALLAVLKSGAAY
VPLDPEYPAERLVHMVTDAAPVVVVTSTDVRTLRTVPRVELDDEATRATLVAAPATGPD
VKMSASHPAYVIYTSGSTGRPKGVVISHGSLANFLAWAREDLGAERLRHVVLSTSLSFDV
SVVELFAPLSCGGTVEIVRNLLALVDRPGRWSASLVSGVPSAFAQLLEAGLDRADVGMIA
LAGEALSARDVRRVRAVLPGARVANFYGPTEATVYATAWYGDTPMDAAAPMGRPLRNT
CVYVLDDGLRVVPVGVVGELYVAGVGLARGYLGRVGLTAERFVACPFGARGERMYRTG
DLVRWRVDGTLEFVGRADDQVKVRGFRVELGEVEGAVAAHPDVVRAVVVVREDRPGD
HRLVAYVTGVDTGGLSSAVMRAVAERLPAYMVPSAVVVLDEIPLTPNGKVDRAGLPVPV
VSVAGFCAPSSPREEVLCGLFAEVLGVERVGVDDGFFDLGGDSILSIQLVARARRAGLELS
VRDVFEGRTVRALAAVVRGSDAGAVGVVGGAEIVLPGVGEVERWPVVEWLAERGGGSL
GGVVRGFNQSVVLAVPAGLVWEELRVLLGAVRDRHEAWRLRVLDSGALCVDGVVPDD
GSWIVRCDLSGMGVDGQVDAVRAAAVEARAWLDPSVGRVVRAVWLERGGDRSGVLVL
VAHHLVVDGVSWRVVLGDLAEGWAQVRSGGRVELGVVGTSLRGWAAALAEQGRRGE
RAGEVELWSRMVRGADVLVGSRAVDGAVDVFGGVVSVDSRASVSVSRALLTEVPSVLG
VGVQEVLLAAFGLAVARWRGRGGPVVVDVEGHGRNEDAVRGADLSRTVGWFTSVYPV
RVPVESASWDEVRAGGPVVGRVVREVKETLRSLPDQGLGYGILRYLDPEHGPALARHAT
PQFGFNYLGRFTTGTDDTGDEGMTDWVPVSGPFAVGAGQDPELPVAHAVEFNAITLDTPE
GPRLGVTWSWPTTLLPESRIRELARYWDEALEGLVEHARHPEAGGLTPSDVTLVEVNQVE
LDRLQAGVAGGAEEILPVSALQEGLLFHSALASGGVDVYVGQLVFDLVGPVDVDRLRAA
VEGLVARHGVLRSGYRQLRSGEWVAVVARQVDLPWQSIDVRDGGIDGLVEEERWRRFD
MGRGPLARFVLIRTHDDRFRFVITYHHVVLDGWSVPVLLRELLALYGSSGDVSVLPGVRS
YGDFLRWVAARDAAAAEGAWRRALTGLEEPSLVAPGVSRDGVVPAAFHGAVDGDLSQK
IVAWARGRGVTVASVVQAAWALVLGRLMGRDDVVFGVTVSGRPAEVVGVEDMVGLFV
NTIPLRARLDPAESLGGFVERLQREQTELLEHQHVRLAEVQRWAGHKELFDVGMVFDNY
PVSSESPEAEFQISRTGGYNGTHYALNLVASMHGLELELEIGYRPDVFDAGRVREVWGWL
VRVLEGVVSGGGGVSVSGVDVLGVGERERLLGWGVGGPVPVVPGGGLVGLFEERVRAD
ADAVAVRGAGVVWSYGELNARVNVVARWLVGRGVGAECGVGVVMGRGVDVVVMLL
AVAKAGGFYVPVDPEWPVERVGWVLADAGVGLVVVGEGLSHVVGDFPGGEVFEFSRVV
RESCLVELVAADGVEVRNVTDGERASRLLPGHPLYVVYTSGSTGRPKGVVVTHASVGGY
LARGRDVYAGAVGGVGFVHSSLAFDLTVTVLFTPLVSGGCVVLGELDESAQGVGASFVK
VTPSHLGLLGELEGVVAGNGMLLVGGEALSGGALREWRERNPGVVVVNAYGPTELTVN
CAEFLIAPGEEVPDGPVPIGRPFAGQRMFVLDAALRVVPVGVVGELYVAGVGLARGYLG
RVGLTAERFVACPFGVPGERMYRTGDLVRWRVDGALEFVGRADDQVKVRGFRVELGEV
EGAVAAHPDVVRAVVVVREDRPGDHRLVAYVTAGGVGGDGLRSAISGLVAERLPAYMV
PSAVVVLDEIPLTPNGKVDRAALPVPEVEAGTGYRAPVSPREEVLCGLFAEVLGVERVGV
DDDFFELGGHSLLATRLISRVRAVLGVEAGVRALFEAPTVSRLERLLRERSGLGVRVPLVA
RERTGREPLSFAQQRLWFLEELEGPGAAYNIPMALRLAGVLDVEALHQALIDVIARHESLR
TLIAQDAGTAWQHILPVDDPRTRPGLPLVDIGADALQERLDEAAGRPFDLAADLPVRATV
FRLTDNDHILLLVLHHIAGDGWSMGPLARDLSTAYSARAAGAASAWRPLSVQYADYAA
WQRDVLGTEDDESSELSAQLAYWRTQLASLPAELALPTDRARPAVATYRGGRIEFTIPAD
VHRSLADLARAEGVTVFMVVQAALAALLSRLGAGDDIPIGTPIAGRTDQATEDLIGFFVNT
LVLRTDVSGDPTFAELLARVRATDLDAYAHQDIPFERLVEAVNPERSLARHPLFQVMLAF
NNAETSTPLPMAEGLAASRQDIEPGVAKFDLALYCNESRGETGDHQGIRSVFEYRRDLWD
EDTVRQLADRFLHVLAAFAAAPEQRASSVDVLRAGERDQLLHEWNDTAAALPPALLPQL
FEEQVRRTPHDVALVSGNIRLTYAELDARANRLAHLLLARGAAPETFVAVALPRTEELLV
ALLAVQKTGAGHLPLDPGFPAERLSYMLDDARPAVVLTTEDISARIPGGSHVVLDSEQVT
GELHDHPATSPAGRGNPAGPAYVIYTSGSTGQPKGVVVPSAALVNFLADMVPRLGLRGG
DRLLSVTTVGFDIAALELFVPLLSGATVVLADGETVRDPALARQTCEDHGVTMVQATPS
WWHGMLADAGDSLRGVHAVVGGEALSPGLRDALTRGARSVTNMYGPTETTIWSTSAGQ
AAGDSAPPSIGTPILNTRVYVLDAALCVVPPGVAGELYIAGDGLARGYLGRAGLTAERFV
ACPFGAPGERMYRTGDLVRWRVDGALEFVGRADDQVKVRGFRVELGEVEGAVAAHPD
VVRAVVVVREDRPGDHRLVAYVTGVDTGGLSSAVMRAVAERLPAYMVPSAVVVLDEIP
LTPNGKVDRAALPVPGVEAGAGYRAPVSPREEVLCGLFAEVLGVERVGVDDDFFGLGGH
SLLATRLISRVRAVLGVEAGVRALFEAPTVSRLERLLRERSGLGVRVPLVARERTGREPLS
FAQQRLWFLEELEGPGAAYNIPMALRLAGVLDVEALHQALIDVIARHESLRTLIARDSDGT
ARQQVLPVGDPAARPALPVVQTDADTLVAKLNEAVGRPFDLTAEMPLRATVFRVADEDH
ALLLVFHHIAGDGWSTGLLARDLSTAYAARLEGRDPQLPPLPVQYADYAAWQRDVLGTE
DDESSELSAQLAYWRTQLADLPAELALPADRVRPARASYEGGRVGFTVPAGVLRDLTRL
ARVEGVTVFMVVQAALAALLSRLGAGDDIPIGTPIAGRTDQATEDLIGFFVNTLVLRTDVS
GDPTFAELLARVRATDLDAYAHQDIPFERLVEAVNPERSLARHPLFQVMLAFDNTADGGP
VEDFPGLSAAGLPLGAGAAKFDLLFGLSEVGGELRGAVEYRCDLFDHPTAARIAERLVRV
LERVAADASVRLGELPVVSDAERACVLTEWNDTAVPGVTGTLSALFEARAAARGDAPAV
VYEGEELSYRELNTRANRLAHVLAEHGAGPERFVGVALPRSPDLVVALLAVVKSGAAYV
PLDPEYPADRLAYMAGDAAPVAVLTRGDVELPGSVPRIGLDDTEIRATLATAPGTNPGTP
VTEAHPAYMIYTSGSTGRPKGVVVSHGAIVNRLAWMQAEYRLDATDRVLQKTPAGFDVS
VWEFFWPLLEGAVLVFARPGGHRDAAYLAGLIERERITTAHFVPSMLRVFLEEPGAALCT
GLRRVICSGEALGTDLAVDFRAKLPVPLHNLYGPTEAAVDVTHHAYEPATGTATVPIGRPI
WNIRTYVLDAALRPVPPGVPGELYLAGAGLARGYHGRPALTAERFVACPFGVPGERMYR
TGDLVRWRVDGTLEFVGRADDQVKVRGFRVELGEVEGAVAAHPDVVRAVVVVREDRP
GDHRLVAYVTVGGVGGDGLRSAISGLVAERLPAYMVPSAVVVLDEIPLTPNGKVDRAGL
PVPVVSVAGFCAPSSPREEVLCGLFAEVLGVERVGVDDGFFDLGGDSILSIQLVARARRAG
LELSVRDVFEGRTVRALAAVVRGSDAGAVGVVGGAEIVLPGVGEVERWPVVEWLAERG
GGSLGGVVRGFNQSVVLAVPAGLVWEELRVLLGAVRDRHEAWRLRVLDSGALCVDGV
VPDDGSWIVRCDLSGMGVDGQVDAVRAAAVEARAWLDPSVGRVVRAVWLERGGDRSG
VLVLVAHHLVVDGVSWRVVLGDLAEGWAQVRSGGRVELGVVGTSLRGWAAALAEQG
RRGERAGEVELWSRMVRGADVLVGSRAVDGAVDVFGGVVSVDSRASVSVSRALLTEVP
SVLGVGVQEVLLAAFGLAVARWRGRGGPVVVDVEGHGRNEDAVRGADLSRTVGWFTS
VYPVRVPVESASWDEVRAGGPVVGRVVREVKETLRSLPDQGLGYGILRYLDPEHGPALA
RHATPQFGFNYLGRFTTGTDETTTADALDRAPAWSLLARSAAGQDPELPVAHAVEFNAIT
LDTPEGPRLGVTWSWPTTLLPESRIRELARYWDEALEGLVEHARHPEAGGLTPSDVGLAE
LSFAEIELLEDDWRTQG

The application's sequence listing, which the Patent Office published only in electronic form, follows.

SEQUENCE LISTING (115 sequences)

SEQ ID NO: 1 - protein, 10 aa, Artificial Sequence
  Description of Artificial Sequence: Synthetic consensus peptide
  MOD_RES (5)..(5): Leu or Val
  MOD_RES (7)..(7): Leu, Met or Val
DILQXGXIWK

SEQ ID NO: 2 - protein, 1040 aa, Bacillus subtilis
MEITFYPLTDAQKRIWYTEKFYPHTSISNLAGIGKLVSADAIDYVLVEQAIQEFIRRNDAMRLRLRLDENGEPVQYISEYRPVDIKHTDTTEDPNAIEFISQWSREETKKPLPLYDCDLFRFSLFTIKENEVWFYANVHHVISDGISMNILGNAIMHIYLELASGSETKEGISHSFIDHVLSEQEYAQSKRFEKDKAFWNKQFESVPELVSLKRNASAGGSLDAERFSKDVPEALHQQILSFCEANKVSVLSVFQSLLAAYLYRVSGQNDVVTGTFMGNRTNAKEKQMLGMFVSTVPLRTNIDGGQAFSEFVKDRMKDLMKTLRHQKYPYNLLINDLRETKSSLTKLFTVSLEYQVMQWQKEEDLAFLTEPIFSGSGLNDVSIHVKDRWDTGKLTIDFDYRTDLFSREEINMICERMITMLENALTHPEHTIDELTLISDAEKEKLLARAGGKSVSYRKDMTIPELFQEKAELLSDHPAVVFEDRTLSYRTLHEQSARIANVLKQKGVGPDSPVAVLIERSERMITAIMGILKAGGAYVPIDPGFPAERIQYILEDCGADFILTESKVAAPEADAELIDLDQAIEEGAEESLNADVNARNLAYIIYTSGTTGRPKGVMIEHRQVHHLVESLQQTIYQSGSQTLRMALLAPFHFDASVKQIFASLLLGQTLYIVPKKTVTNGAALTAYYRKNSIEATDGTPAHLQMLAAAGDFEGLKLKHMLIGGEGLSSVVADKLLKLFKEAGTAPRLTNVYGPTETCVDASVHPVIPENAVQSAYVPIGKALGNNRLYILDQKGRLQPEGVAGELYIAGDGVGRGYLHLPELTEEKFLQDPFVPGDRMYRTGDVVRWLPDGTIEYLGREDDQVKVRGYRIELGEIEAVIQQAPDVAKAVVLARPDEQGNLEVCAYVVQKPGSEFAPAGLREHAARQLPDYMVPAYFTEVTEIPLTPSGKVDRRKLFALEVKAVSGTAYTAPRNETEKAIAAIWQDVLNVEKAGIFDNFFETGGHSLKAMTLLTKIHKETGIEIPLQFLFEHPTITALAE

SEQ ID NO: 3 - protein, 1009 aa, Bacillus subtilis
IVSQFEDAGVGYNMPAAAILEGPLDIQKLERAFQGLIRRHESLRTSFVLENSTPRQKIHDSVDFNIEMIERGGRSDEAIMASFVRTFDLAKAPLFRIGLLGLEENRHMLLFDMHHLISDGVSIGIMLEELARIYKGEQLPDLRLQYKDYAVWQSRQAAEGYKKDQAYWKEVFAGELPVLQLLSDYPRPPVQSFEGDRVSIKLDAGVKDRLNRLAEQNGATLYMVMLSAYYTLLSKYTGQDDIIVGTPSAGRNHSDTEGIIGMFVNTLAIRSEVKQNETFTQLISRVRKRVLDAFSHQDYPFEWLVEDLNIPRDVSRHPLFDTMFSLQNATEGIPAVGDLSLSVQETNFKIAKFDLTVQARETDEGIEIDVDYSTKLFKQSTADRLLTHFARLLEDAAADPEKPISEYKLLSEEEAASQIQQFNPGRTPYPKDKTIVQLFEEQAANTPDHTALQYEGESLTYRELNERANRLARGILSLGAGEGRTAAVLCERSMDMIVSILAVLKSGSAYVPIDPEHPIQRMQHFFRDSGAKVLLTQRKLKALAEEAEFKGVIVLADEEESYHADARNLALPLDSAAMANLTYTSGTTGTPKGNIVTHANILRTVKETNYLSITEQDTILGLSNYVFDAFMFDMFGSLLNGAKLVLIPKETVLDMARLSRVIERENISILMITTALFHLLVDLNPACLSTLRKIMFGGERASVEHVRKALQTVGKGKLLHMYGPSESTVFATYHPVDELEEHTLSVPIGKPVSNTEVYILDRTGHVQPAGIAGELCVSGEGLVKGYYNRPELTEEKFVPHPFTSGERMYKTGDLARWLPNGDIEFIGRIDHQVKIRGQRIELGEIEHQLQTHDRVQESVVLAVDQGAGDKLLCAYYVGEGDISSQEMREHAAKDLPAYMVPAVFIQMDELPLTGNGKIDRRALPIPDANVSRGVSYVAPRNGTEQKVADIWAQVLQAEQVGAYDHFFDIGGHSLAGMKMLALVHQELGVELSLKDLFQSPTVEGLAQVI

SEQ ID NO: 4 - protein, 1006 aa, Bacillus subtilis
VSSPQKRMYVLQQLEDAQTSYNMPAVLRLTGELDVERLNSVMQQLMQRHEALRTTFEIKDGETVQRIWEEAECEIAYFEAPEEETERIVSEFIKPFKIDQLPLFRIGLIKHSDTEHVLLFDMHHIISDGASVGVLIEELSKLYDGETLEPLRIQYKDYAVWQQQFIQSELYKKQEEHWLKELDGELPVLTLPTDYSRPAVQTFEGDRIAFSLEAGKADALRRLAKETDSTLYMVLLASYSAFLSKISGQDDIIVGSPVAGRSQADVSRVIGMFVNTLALRTYPKGEKTFADYLNEVKETALSAFDAQDYPLEDLIGNVQVQRDTSRNPLFDAVFSMQNANIKDLTMKGIQLEPHPFERKTAKFDLTLTADETDGGLTFVLEYNTALFKQETIERWKQYWMELLDAVTGNPNQPLSSLSLVTETEKQALLEAWKGKALPVPTDKTVHQLFEETAQRHKDRPAVTYNGQSWTYGELNAKANRLARILMDCGISPDDRVGVLTKPSLEMSAAVLGVLKAGAAFVPIDPDYPDQRIEYILQDSGAKLLLKQEGISVPDSYTGDVILLDGSRTILSLPLDENDEENPETAVTAENLAYMIYTSGTTGQPKGVMVEHHALVNLCFWHHDAFSMTAEDRSAKYAGFGFDASIWEMFPTWTIGAELHVIEEAIRLDIVRLNDYFETNGVTITFLPTQLAEQFMELENTSLRVLLTGGDKLKRAVKKPYTLVNNYGPTENTVVATSAEIHPEEGSLSIGRAIANTRVYILGEGNQVQPEGVAGELCVAGRGLARGYLNREDETAKRFVADPFVPGERMYRTGDLVKWTGGGIEYIGRIDQQVKVRGYRIELSEIEVQLAQLSEVQDAAVTAVKDKGGNTAIAAYVTPESADIEALKSALKETLPDYMIPAFWVTLNELPVTANGKVDRKALPEPDIEAGSGEYKAPTTDMEELLAGIWQDVLGMSEVGVTDNFFSLGGDSIKGIQMASRLNQHGWKLEMKDLFQHPTIEELTQYV

SEQ ID NO: 5 - protein, 1024 aa, Bacillus subtilis
LTPMQEGMLYHAMLDPHSSSYFTQLELGIHGAFDLEIFEKSVNELIRSYDILRTVFVHQQLQKPRQVVLAERKTKVHYEDISHADENRQKEHIERYKQDVQRQGFNLAKDILFKVAVFRLAADQLYLVWSNHHIMMDGWSMGVLMKSLFQNYEALRAGRTPANGQGKPYSDYIKWLGKQDNEEAESYWSERLAGFEQPSVLPGRLPVKKDEYVNKEYSFTWDETLVARIQQTANLHQVTGPNLFQAVWGIVLSKYNFTDDVIFGTVVSGRPSEINGIETMAGLFINTIPVRVKVERDAAFADIFTAVQQHAVEAERYDYVPLYEIQKRSALDGNLLNHLVAFENYPLDQELENGSMEDRLGFSIKVESAFEQTSFDFNLIVYPGKTWTVKIKYNGAAFDSAFIERTAEHLTRMMEAAVDQPAAFVREYGLVGDEEQRQIVEVFNSTKAELPEGMAVHQVFEEQAKRTPASTAVVYEGTKLTYRELNAAANRLARKLVEHGLQKGETAAIMNDRSVETVVGMLAVLKAGAAYVPLDPALPGDRLRFMAEDSSVRMVLIGNSYTGQAHQLQVPVLTLDIGFEESEAADNLNLPSAPSDLAYIMYTSGSTGKPKGVMIEHKSILRLVKNAGYVPVTEEDRMAQTGAVSFDAGTFEVFGALLNGAALYPVKKETLLDAKQFAAFLREQSITTMWLTSPLFNQLAAKDAGMFGTLRHLIIGGDALVPHIVSKVKQASPSLSLWNGYGPTENTTFSTSFLIDREYGGSIPIGKPIGNSTAYIMDEQQCLQPIGAPGELCVGGIGVARGYVNLPELTEKQFLEDPFRPGERIYRTGDLARWLPDGNIEFLGRIDNQVKVRGFRIELGEIETKLNMAEHVTEAAVIIRKNKADENEICAYFTADREVAVSELRKTLSQSLPDYMVPAHLIQMDSLPLTPNGKINKKELPAPQSEAVQPEYAAPKTESEKKLAEIWEGILGVKAGVTDNFFMIGGHSLKAMMMTAKIQEHFHKEVPIKVLFEKPTIQELALYL

SEQ ID NO: 6 - protein, 1016 aa, Bacillus subtilis
VSPAQRRMYILNQLGQANTSYNVPAVLLLEGEVDKDRLENAIQQLINRHEILRTSFDMIDGEVVQTVHKNISFQLEAAKGREEDAEEIIKAFVQPFELNRAPLVRSKLVQLEEKRHLLLIDMHHIITDGSSTGILIGDLAKIYQGADLELPQIHYKDYAVWHKEQTNYQKDEEYWLDVFKGELPILDLPADFERPAERSFAGERVMFGLDKQITAQIKSLMAETDTTMYMFLLAAFNVLLSKYASQDDIIVGSPTAGRTHPDLQGVPGMFVNTVALRTAPAGDKTFAQFLEEVKTASLQAFEHQSYPLEELIEKLPLTRDTSRSPLFSVMFNMQNMEIPSLRLGDLKISSYSMLHHVAKFDLSLEAVEREEDIGLSFDYATALFKDETIRRWSRHFVNIIKAAAANPNVRLSDVDLLSSAETAALLEERHMTQITEATFAALFEKQAQQTPDHSAVKAGGNLLTYRELDEQANQLAHHLRAQGAGNEDIVAIVMDRSAEVMVSILGVMKAGAAFLPIDPDTPEERIRYSLEDSGAKFAVVNERNMTAIGQYEGIIVSLDDGKWRNESKERPSSISGSRNLAYVIYTSGTTGKPKGVQIEHRNLTNYVSWFSEEAGLTENDKTVLLSSYAFDLGYTSMFPVLLGGGELHIVQKETYTAPDEIAHYIKEHGITYIKLTPSLFHTIVNTASFAKDANFESLRLIVLGGEKIIPTDVIAFRKMYGHTEFINHYGPTEATIGAIAGRVDLYEPDAFAKRPTIGRPIANAGALVLNEALKLVPPGASGQLYITGQGLARGYLNRPQLTAERFVENPYSPGSLMYKTGDVVRRLSDGTLAFIGRADDQVKIRGYRIEPKEIETVMLSLSGIQEAVVLAVSEGGLQELCAYYTSDQDIEKAELRYQLSLTLPSHMIPAFFVQVDAIPLTANGKTDRNALPKPNAAQSGGKALAAPETALEESLCRIWQKTLGIEAIGIDDNFFDLGGHSLKGMMLIANIQAELEKSVPLKALFEQPTVRQLAAY

SEQ ID NO: 7 - protein, 1006 aa, Bacillus subtilis
LSSAQKRMYVLNQLDRQTISYNMPSVLLMEGELDISRLRDSLNQLVNRHESLRTSFMEANGEPVQRIIEKAEVDLHVFEAKEDEADQKIKEFIRPFDLNDAPLIRAALLRIEAKKHLLLLDMHHIIADGVSRGIFVKELALLYKGEQLPEPTLHYKDFAVWQNEAEQKERMKEHEAYWMSVLSGELPELDLPLDYARPPVQSFKGDTIRFRTGSETAKAVEKLLAETGTTLHMVLHAVFHVFLSKISGQRDIVIGSVTAGRTNADVQDMPGMFVNTLALRMEAKEQQTFAELLELAKQTNLSALEHQEYPFEDLVNQLDLPRDMSRNPLFNVMVTTENPDKEQLTLQNLSISPYEAHQGTSKFDLTLGGFTDENGIGLQLEYATDLFAKETAEKWSEYVLRLLKAVADNPNQPLSSLLLVTETEKQALLEAWKGKALPVPTDKTVHQLFEETVQRHKDRPAVTYNGQSWTYGELNAKANRLARILMDCGISPDDRVGVLTKPSLEMSAAVLGVLKAGAAFVPIDPDYPDQRIEYILQDSGAKLLLKQEGISVPDSYTGDVILLDGSRTILSLPLDENDEGNPETAVTAENLAYMIYTSGTTGQPKGVMVEHHALVNLCFWHHDAFSMTAEDRSAKYAGFGFDASIWEMFPTWTIGAELHVIDEAIRLDIVRLNDYFETNGVTITFLPTQLAEQFMELENTSLRVLLTGGDKLKRAVKKPYTLVNNYGPTENTVVATSAEIHPEEGSLSIGRAIANTRVYILGEGNQVQPEGVAGELCVAGRGLARGYLNREDETAKRFVADPFVPGERMYRTGDLVKWVNGGIEYIGRIDQQVKVRGYRIELSEIEVQLAQLSEVQDAAVTAVKDKGGNTAIAAYVTPETADIEALKSTLKETLPDYMIPAFWVTLNELPVTANGKVDRKALPEPDIEAGSGEYKAPTTDMEELLAGIWQDVLGMSEVGVTDNFFSLGGDSIKGIQMASRLNQHGWKLEMKDLFQHPTIEELTQYV

SEQ ID NO: 8 - protein, 1025 aa, Bacillus subtilis
LSPMQEGMLFHAILNPGQSFYLEQITMKVKGSLNIKCLEESMNVIMDRYDVFRTVFIHEKVKRPVQVVLKKRQFHIEEIDLTHLTGSEQTAKINEYKEQDKIRGFDLTRDIPMRAAIFKKAEESFEWVWSYHHIILDGWCFGIVVQDLFKVYNALREQKPYSLPPVKPYKDYIKWLEKQDKQASLRYWREYLEGFEGQTTFAEQRKKQKDGYEPKELLFSLSEAETKAFTELAKSQHTTLSTALQAVWSVLISRYQQSGDLAFGTVVSGRPAEIKGVEHMVGLFINVVPRRVKLSEGITFNGLLKRLQEQSLQSEPHQYVPLYDIQSQADQPKLIDHIIVFENYPLQDAKNEESSENGFDMVDVHVFEKSNYDLNLMASPGDEMLIKLAYNENVFDEAFILRLKSQLLTAIQQLIQNPDQPVSTINLVDDREREFLLTGLNPPAQAHETKPLTYWFKEAVNANPDAPALTYSGQTLSYRELDEEANRIARRLQKHGAGKGSVVALYTKRSLELVIGILGVLKAGAAYLPVDPKLPEDRISYMLADSAAACLLTHQEMKEQAAELPYTGTTLFIDDQTRFEEQASDPATAIDPNDPAYIMYTSGTTGKPKGNITTHANIQGLVKHVDYMAFSDQDTFLSVSNYAFDAFTFDFYASMLNAARLIIADEHTLLDTERLTDLILQENVNVMFATTALFNLLTDAGEDWMKGLRCILFGGERASVPHVRKALRIMGPGKLINCYGPTEGTVFATAHVVHDLPDSISSLPIGKPISNASVYILNEQSQLQPFGAVGELCISGMGVSKGYVNRADLTKEKFIENPFKPGETLYRTGDLARWLPDGTIEYAGRIDDQVKIRGHRIELEEIEKQLQEYPGVKDAVVVADRHESGDASINAYLVNRTQLSAEDVKAHLKKQLPAYMVPQTFTFLDELPLTTNGKVNKRLLPKPDQDQLAEEWIGPRNEMEETIAQIWSEVLGRKQIGIHDDFFALGGHSLKAMTAASRIKKELGIDLPVKLLFEAPTIAGISAYL

SEQ ID NO: 9 - protein, 521 aa, Bacillus subtilis
KEKVISKWNETAKSEKLVSLQDMFEKQAVLTPERIALMCDDIQVNYRKLNEEANRLARLLIEKGIGPEQFVALALPRSPEMVASMLGVLKTGAAYLPLDPEFPADRISYMLEDAKPSCIITTEEIAASLPDDLAVPELVLDQAVTQEIIKRYSPENQDVSVSLDHPAYIIYTSGSTGRPKGVVVTQKSLSNFLLSMQEAFSLGEEDRLLAVTTVAFDISALELYLPLISGAQIVIAKKETIREPQALAQMIENFDINIMQATPTLWHALVTSEPEKLRGLRVLVGGEALPSGLLQELQDLHCSVTNLYGPTETTIWSAAAFLEEGLKGVPPIGKPIWNTQVYVLDNGLQPVPPGVVGELYIAGTGLARGYFHRPDLTAERFVADPYGPPGTRMYRTGDQARWRADGSLDYIGRADHQIKIRGFRIELGEIDAVLANHPHIEQAAVVVREDQPGDKRLAAYVVADAAIDTAELRRYMGASLPDYMVPSAFVEMDELPLTPNGKLDRKALPAPDFSTSVSDRA

SEQ ID NO: 10 - protein, 2378 aa, Bacillus subtilis
MPDTKDLQYSLTGAQTGIWFAQQLDPDNPIYNTAEYIEINGPVNIALFEEALRHVIKEAESLHVRFGENMDGPWQMINPSPDVQLHVIDVSSEPDPEKTALNWMKADLAKPVDLGYAPLFNEALFIAGPDRFFWYQRIHHIAIDGFGFSLIAQRVASTYTALIKGQTAKSRSFGSLQAILEEDTDYRGSEQYEKDRQFWLDRFADAPEVVSLADRAPRTSNSFLRHTAYLPPSDVNALKEAARYFSGSWHEVMIAVSAVYVHRMTGSEDVVLGLPMMGRIGSASLNVPAMVMNLLPLRLTVSSSMSFSELIQQISREIRSIRRHHKYRHEELRRDLKLIGENHRLFGPQINLMPFDYGLDFAGVRGTTHNLSAGPVDDLSINVYDRTDGSGLRIDVDANPEVYSESDIKLHQQRILQLLQTASAGEDMLIGQMELLLPEEKEKVISKWNETAKSEKLVSLQDMFEKQAVLTPERIALMCDDIQVNYRKLNEEANRLARLLIEKGIGPEQFVALALPRSPEMVASMLGVLKTGAAYLPLDPEFPADRISYMLEDAKPSCIITTEEIAASLPDDLAVPELVLDQAVTQEIIKRYSPENQDVSVSLDHPAYIIYTSGSTGRPKGVVVTQKSLSNFLLSMQEAFSLGEEDRLLAVTTVAFDISALELYLPLISGAQIVIAKKETIREPQALAQMIENFDINIMQATPTLWHALVTSEPEKLRGLRVLVGGEALPSGLLQELQDLHCSVTNLYGPTETTIWSAAAFLEEGLKGVPPIGKPIWNTQVYVLDNGLQPVPPGVVGELYIAGTGLARGYFHRPDLTAERFVADPYGPPGTRMYRTGDQARWRADGSLDYIGRADHQIKIRGFRIELGEIDAVLANHPHIEQAAVVVREDQPGDKRLAAYVVADAAIDTAELRRYMGASLPDYMVPSAFVEMDELPLTPNGKLDRKALPAPDFSTSVSDRAPRTPQEEILCDLFAEVLGLARVGIDDSFFELGGHSLLAARLMSRIREVMGAELGIAKLFDEPTVAGLAAHLDLAQSACPALQRAERPEKIPLSFAQRRLWFLHCLEGPSPTYNIPVAVRLSGELDQGLLKAALYDLVCRHESLRTIFPESQGTSYQHILDADRACPELHVTEIAEKELSDRLAEAVRYSFDLAAEPAFRAELFVIGPDEYVLLLLVHHIVGDGWSLTPLTRDLGTAYAARCHGRSPEWAPLAVQYADYALWQQELLGNEDDPNSLIAGQLAFWKETLKNLPDQLELPTDYSRPAEPSHDGDTIHFRIEPEFHKRLQELARANRVSLFMVLQSGLAALLTRLGAGTDIPIGSPIAGRNDDALGDLVGLFINTLVLRTDTSGDPSFRELLDRVREVNLAAYDNQDLPFERLVEVLNPARSRATHPLFQIMLAFQNTPDAELHLPDMESSLRINSVGSAKFDLTLEISEDRLADGTPNGMEGLLEYSTDLFKRETAQALADRLMRLLEAAESDPDEQIGNLDILAPEEHSSMVTDWQSVSEKIPHACLPEQFEKQAALRPDAIAVVYENQELSYAELNERANRLARMMISEGVGPEQFVALALPRSLEMAVGLLAVLKAGAAYLPLDPDYPADRIAFMLKDAQPAFIMTNTKAANHIPPVENVPKIVLDDPELAEKLNTYPAGNPKNKDRTQPLSPLNTAYVIYTSGSTGVPKGVMIPHQNVTRLFAATEHWFRFSSGDIWTMFHSYAFDFSVWEIWGPLLHGGRLVIVPHHVSRSPEAFLRLLVKEGVTVLNQTPSAFYQFMQAEREQPDLGQALSLRYVIFGGEALELSRLEDWYNRHPENRPQLINMYGITETTVHVSYIELDRSMAALRANSLIGCGIPDLGVYVLDERLQPVPPGVAGELYVSGAGLARGYLGRPGLTSERFIADPFGPPGTRMYRTGDVARLRADGSLDYVGRADHQVKIRGFRIELGEIEAALVQHPQLEDAAVIVREDQPGDKRLAAYVIPSEETFDTAELRRYAAERLPDYMVPAAFVTMKELPLTPNGKLDRKALPAPDFAAAVTGRGPRTPQEEILCDLFMEVLHLPRVGIDDRFFDLGGHSLLAVQLMSRIREALGVELSIGNLFEAPTVAGLAERLEMGSSQSALDVLLPLRTSGDKPPLFCVHPAGGLSWCYAGLMTNIGTDYPIYGLQARGIGQREELPKTLDDMAADYIKQIRTVQPKGPYHLLGWSLGGNVVQAMATQLQNQGEEVSLLVMLDAYPNHFLPIKEAPDDEEALIALLALGGYDPDSLGEKPLDFEAAIEILRRDGSALASLDETVILNLKNTYVNSVGILGSYKPKTFRGNVLFFRSTIIPEWFDPIEPDSWKPYINGQIEQIDIDCRHKDLCQPEPLAQIGKVLAVKLEELNK

SEQ ID NO: 11 - protein, 520 aa, Bacillus subtilis
EKQMILKTWNATGKTYPYITFHELFEQQAKKTPDRAAVSYEGQTLTYRELDEKSTQLAIYLQAHGVGPDRLAGIYVDRSLDMLVGLLAILKAGGAYVPLDPSYPAERLEYMLEDSEVFITLTTSELVNTLSWNGVTTALLDQDWDEIAQTASDRKVLTRTVTPENLAYVIYTSGSTGKPKGVMIPHKALTNFLVSMGETPGLTAEDKMLAVTTYCFDIAALELFLPLIKGAHCYICQTEHTKDVEKLKRDIRAIKPTVMQATPATWKMLFYSGWENEESVKILCGGEALPETLKRYFLDTGSEAWNMFGPTETTIWSAVQRINVECSHATIGRPIANTQIYITDSQLAPVPAGVPGELCIAGDGVAKGYYKKEELTDSRFIDNPFEPGSKLYRTGDMARWLTGGRIEYIGRIDNQVKIRGFRIELGDIESRLSEHPGILECVVVADMDNLAAYYTAKHANASLTARELRHFVKNALPAYMVPSYFIQLDHMPLTPNGKIDRNSLKNIDLSGEQLKQRQTS

SEQ ID NO: 12 - protein, 5043 aa, Bacillus subtilis
MRNNDNIRILTNPSVSHGEPLHISEKQPATIPEVLYRTATELGDTKGIIYLQPDGTEVYQSYRRLWDDGLRIAKGLRQSGLKAKQSVILQLGDNSQLLPAFWGCVLTGVVPAPLAVPPTYAESSSGTQKLKDAWTLLDKPAVITDRGMHQEMLDWAKEQGLEGFRAIIVEDLLSAEADTDWHQSSPEDLALLLLTSGSTGTPKAVMLNHRNIMSMVKGIIQMQGFTREDITFNWMPFDHVGGIGMLHLRDVYLGCQEINVSSETILMEPLKWLDWIDHYRASVTWAPNFAFGLVTDFAEEIKDKKWDLSSMRYMLNGGEAMVAKVGRRILELLEPHGLPADAIRPAWGMSETSSGVIFSHEFTRAGTSDDDHFVEIGSPIPGFSMRIVNDHNELVEEGEIGRFQVSGLSVTSGYYQRPDLNESVFTEDGWFETGDLGFLRNGRLTITGRTKDAIIINGINYYSHAIESAVEELPEIETSYTAACAVRLGQNSTDQLAIFFVTSAKLNDEQMSQLLRNIQSHVSQVIGVTPEYLLPVQKEEIPKTAIGKIQRTQLKTSFENGEFDHLLHKPNRMNDAVQDEGIQQADQVKRVREEIQKHLLTCLTEELHVSHDWVEPNANIQSLGVNSIKMMKLIRSIEKNYHIKLTAREIHQYPTIERLASYLSEHEDLSSLSADKKGTDTYKTEPERSQATFQPLSEVQKGLWTLQKMSPEKSAYHVPLCFKFSSGLHHETFQQAFGLVLNQHPILKHVIQEKDGVPFLKNEPALSIEIKTENISSLKESDIPAFLRKKVKEPYVKENSPLVRVMSFSRSEQEHFLLVVIHHLIFDGVSSVTFIRSLFDTYQLLLKGQQPEKAVSPAIYHDFAAWEKNMLAGKDGVKHRTYWQKQLSGTLPNLQLPNVSASSVDSQFREDTYTRRLSSGFMNQVRTFAKEHSVNVTTVFLSCYMMLLGRYTGQKEQIVGMPAMVRPEERFDDAIGHFLNMLPIRSELNPADTFSSFISKLQLTILDGLDHAAYPFPKMVRDLNIPRSQAGSPVFQTAFFYQNFLQSGSYQSLLSRYADFFSVDFVEYIHQEGEYELVFELWETEEKMELNIKYNTGLFDAASISAMFDHFVYVTEQAMLNPSQPLKEYSLLPEAEKQMILKTWNATGKTYPYITFHELFEQQAKKTPDRAAVSYEGQTLTYRELDEKSTQLAIYLQAHGVGPDRLAGIYVDRSLDMLVGLLAILKAGGAYVPLDPSYPAERLEYMLEDSEVFITLTTSELVNTLSWNGVTTALLDQDWDEIAQTASDRKVLTRTVTPENLAYVIYTSGSTGKPKGVMIPHKALTNFLVSMGETPGLTAEDKMLAVTTYCFDIAALELFLPLIKGAHCYICQTEHTKDVEKLKRDIRAIKPTVMQATPATWKMLFYSGWENEESVKILCGGEALPETLKRYFLDTGSEAWNMFGPTETTIWSAVQRINVECSHATIGRPIANTQIYITDSQLAPVPAGVPGELCIAGDGVAKGYYKKEELTDSRFIDNPFEPGSKLYRTGDMARWLTGGRIEYIGRIDNQVKIRGFRIELGDIESRLSEHPGILECVVVADMDNLAAYYTAKHANASLTARELRHFVKNALPAYMVPSYFIQLDHMPLTPNGKIDRNSLKNIDLSGEQLKQRQTSPKNIQDTVFTIWQEVLKTSDIEWDDGFFDVGGDSLLAVTVADRIKHELSCEFSVTDLFEYSTIKNISQYITEQRMGDASDHIPTDPAAHIEDQSTEMSDLPDYYDDSVAIIGISCEFPGAKNHDEFWENLRDGKESIAFFNKEELQRFGISKEIAENADYVPAKASIDGKDRFDPSFFQISPKDAEFMDPQLRMLLTHSWKAIEDAGYAARQIPQTSVFMSASNNSYRALLPSDTTESLETPDGYVSWVLAQSGTIPTMISHKLGLRGPSYFVHANCSSSLIGLHSAYKSLLSGESDYALVGGATLHTESNIGYVHQPGLNFSSDGHIKAFDASADGMIGGEGVAVVLLKKAADAVKDGDHIYALLRGIGVNNDGADKVGFYAPSVKGQADVVQQVMNQTKVQPESICYVEAHGTGTKLGDPIELAALTNVYRQYTNKTQFCGIGSVKTNIGHLDTAAGLAGCIKVVMSLYHQELAPSVNYKEPNPNTDLASSPFYVVDQKKTLSREIKTHRAALSSFGLGGTNTHAIFEQFKRDSDKGKIDGTCIVPISAKNKERLQEYAEDILAYLERRGFENSQLPDFAYTLQVGREAMEHRVVFIADHVNELKQRLTDFINGNTAIEGCFQGSKHNAREVSWLTEDEDSAELIRKWMAKGKVNKLAEMWSKGAHIDWMQLYKGERPNRMSLPTYPFAKERYWPSQDDRKPVAQISGNQTGIGSIHPLLHQNTSDFSEQKFSSVFTGDEFFLRDHVVRGKPVLPGVAYLEMAYAAINQAAGSEIGQDVRIRLNHTVWVQPVVVDRHSAQVDISLFPEEDGKITFDIYSTQEDGDDPVIHSQGSAELASAAETPVADLTEMSRRCGKGKMSPDQFYEEGRSRGMFHGPAFQGIKNVNIGNREVLAQLQLPEIVSGTNEQFVLHPSIMDSALQTATICIMQELTDQKLILPFALEELEVIKGCSSSMWAYARLSDSDHSGGVVQKADIDVIDESGTVCVRIKGFSTRVLEGEVHTSKPSTRHERLMLEPVWEKQNEEREDEDLSYTEHIIVLFETERSVTDSIASHMKDARVITLNEAVGHIAERYQCYMQNIFELLQSKVRKLSAGRIIIQAIVPLEKEKQLFAGVSGLFKTAEIEFSKLTAQVIEIEKPEEMIDLHLKLKDDSRRPFDKQIRYEAGYRFVKGWREMVLPSADTLHMPWRDEGVYLITGGAGSLGLLFAKEIANRTGRSTIVLTGRSVLSEDKENELEALRSIGAEVVYREADVSDQHAVRHLLEEIKERYGTLNGIIHGAGSSKDRFIIHKTNEEFQEVLQPKVSGLLHVDECSKDFPLDFFIFFSSVSGCLGNAGQADYAAANSFMDAFAEYRRSLAASKKRFGSTISFNWPLWEEGGMQVGAEDEKRMLKTTGMVPMPTDSGLKAFYQGIVSDKPQVFVMEGQLQKMKQKLLSAGSKAKRNDQRKADQDQGQTRKLEAALIQMVGAILKVNTDDIDVNTELSEYGFDSVTFTVFTNKINEKFQLELTPTIFFEYGSVQSLAEYVVAAYQGEWNQDATAKGKDERTNLVHSLSSLEASLSNMVSAILKVNSEDIDVNTELSEYGFDSVTFTVFTNKINEEFQLELTPTIFFEYGSLHSLAEYLTVEHGDTLVQEREKPEGQEELQTKSSEAPKITSRRKRRFTQPIIAKAERNKKQAADFEPVAIVGISGRFPGAMDIDEFWKNLEEGKDSITEVPKDRWDWREHYGNPDTDVNKTDIKWGGFIDGVAEFDPLFFGISPREADYVDPQQRLLMTYVWKALEDAGCSPQSLSGTGTGIFIGTGNTGYKDLFHRANLPIEGHAATGHMIPSVGPNRMSYFLNIHGPSEPVETACSSSLVAIHRAVTAMQNGDCEMAIAGGVNTILTEEAHISYSKAGMLSTDGRCKTFSADANGYVRGEGVGMVMLKKLEDAERDGNHIYGVIRGTAENHGGRANTLTSPNPKAQADLLVRAYRQADIDPSTVTYIEAHGTGTELGDPIEINGLKAAFKELSNMRGESQPDVPDHRCGIGSVKSNIGHLELAAGISGLIKVLLQMKHKTLVKSLHCETLNPYLQLTDSPFYIVQEKQEWKSVTDRDGNELPRRAGISSFGIGGVNAHIVIEEYMPKANSEHTATEQPNVIVLSAKNKSRLIDRASQLLEVIRNKKYTDQDLHRIAYTLQVGREEMDERLACVAGTMQELEEKLQAFVDGKEETDEFFRGQSHRNKETQTIFTADEDMALALDAWIRKRKYAKLADLWVKGVSIQWNTLYGETKPRLISLPSYPFAKDHYWVPAKEHSERDKKELVNAIEDRAACFLTKQWSLSPIGSAVPGTRTVAILCCQETADLAAEVSSYFPNHLLIDVSRIENDQSDIDWKEFDGLVDVIGCGWDDEGRLDWIEWVQRLVEFGHKEGLRLLCVTKGLESFQNTSVRMAGASRAGLYRMLQCEYSHLISRHMDAEEVTDHRRLAKLIADEFYSDSYDAEVCYRDGLRYQAFLKAHPETGKATEQSAVFPKDHVLLITGGTRGIGLLCARHFAECYGVKKLVLTGREQLPPREEWARFKTSNTSLAEKIQAVRELEAKGVQVEMLSLTLSDDAQVEQTLQHIKRTLGPIGGVIHCAGLTDMDTLAFIRKTSDDIQRVLEPKVSGLTTLYRHVCNEPLQFFVLFSSVSAIIPELSAGQADYAMANSYMDYFAEAHQKHAPIISVQWPNWKETGMGEVTNQAYRDSGLLSITNSEGLRFLDQIVSKKFGPVVLPAMANQTNWEPELLMKRRKPHEGGLQEAALQSPPARDIEEADEVSKCDGLLSETQSWLIDLFTEELRIDREDFEIDGLFQDYGVDSIILAQVLQRINRKLEAALDPSILYEYPTIQRFADWLIGSYSERLSALFGGRISDASAPLENKIEAEASVPGKDRALTPQIQAPAILSPDSHAEGIAVVGLSCRFPGAETLESYWSLLSEGRSSIGPIPAERWGCKTPYYAGVIDGVSYFDPDFFLLHEEDVRAMDPQALLVLEECLKLLYHAGYTPEEIKGKPVGVYIGGRSQHKPDEDSLDHAKNPIVTVGQNYLAANLSQFFDVRGPSVVVDTACSSALVGMNMAIQALRGGDIQSAIVGGVSLLSSDASHRLFDRRGILSKHSSFHVFDERADGVVLGEGVGMVMLKTVKQALEDGDIIYAVVKAASVNNDGRTAGPATPNLEAQKEVMKDALFKSGKKPEDISYLEANGSGSIVTDLLELKAIQSVYRSGHSSPLSLGSIKPNIGHPLCAEGIASFIKVVLMLKERRFVPFLSGEKEMAHFDQQKANITFSRALEKWTDSQPTAAINCFADGGTNAHVIVEAWEKDEKHAIKRSPISPPQLKKRMLSPGEPKLEAETSKMTAANIWDTYEVEV

SEQ ID NO: 13 - DNA, 3783 bp, Artificial Sequence
  Description of Artificial Sequence: Synthetic polynucleotide
cctttaacggatgcacaaaaacgaatttggtacacagaaaaattttatcctcacacgagcatttcaaatcttgcggggattggtaagctggtttcagctgatgcgattgattatgtgcttgttgagcaggcgattcaagagtttattcgcagaaatgacgccatgcgccttcggttgcggctagatgaaaacggggagcctgttcaatatattagcgagtatcggcctgttgatataaaacatactgacactactgaagatccgaatgcgatagagtttatttcacaatggagccgggaggaaacgaagaaacctttgccgctatacgattgtgatttgttccgtttttccttgttcaccataaaggaaaatgaagtgtggttttacgcaaatgttcatcacgtgatttctgatggtatctccatgaatattctcgggaatgcgatcatgcacatttatttagaattagccagcggctcagagacaaaagaaggaatctcgcattcatttatcgatcatgttttatctgaacaggaatatgctcaatcgaagcggtttgaaaaggacaaggcgttttggaacaaacaatttgaatcggtgcctgaacttgtttccttgaaacggaatgcatccgcagggggaagtttagatgctgagaggttctctaaagatgtgcctgaagcgcttcatcagcagattctgtcgttttgtgaggcgaataaagtcagtgttctttcggtatttcaatcgctgctcgccgcctatttgtacagggtcagcggccagaatgatgttgtgacgggaacatttatgggcaaccggacaaatgcgaaagagaagcagatgcttggcatgtttgtttctacggttccgcttcggacaaacattgacggcgggcaggcgttttcagaatttgtcaaagaccggatgaaggatctgatgaagacacttcgccaccaaaagtatccgtataatctcctaatcaacgatttgcgtgaaacaaagagctctctgaccaagctgttcacggtttctcttgaatatcaagtgatgcagtggcagaaagaagaggatcttgcctttttgactgagccgattttcagcggcagcggattaaatgatgtctcaattcatgtaaaggatcgatgggatactgggaaactcaccatagattttgattaccgcactgatttattttcacgtgaagaaatcaacatgatttgtgagcgcatgattaccatgctggagaacgcgttaacgcatccagaacatacaattgatgaattaacactgatttctgatgcggagaagcagatgattctcaaaacatggaacgccacaggaaaaacgtatccatatataacttttcatgagttgtttgagcagcaggcgaaaaagacgcctgatagagcggctgtcagctatgaaggtcaaacattgacgtatcgggagcttgatgagaaaagcacacagctggccatttatttgcaggcgcatggagtgggtcctgaccgtctggcggggatctatgtggatcgatcgctggacatgctagtgggtttattagcgatcctcaaggctgggggagcgtatgtgccgctagacccgtcctatccggctgaacgattagaatacatgcttgaggacagtgaagttttcattacactgacgacatcggaattagtaaatacgttgagttggaacggtgtcacaacagcccttttagatcaagattgggatgaaattgctcaaacagcctctgatcgaaaagtgcttacacgcactgtcacgccagagaacttggcatatgtcatttatacatccggcagcacaggaaagccaaaaggtgtcatgataccacataaagctttgacaaactttctcgtttcgatgggggaaacaccaggtcttacggcagaggataaaatgcttgctgtcacaacctactgttttgatattgcagctctggaattatttttgcctttaataaagggcgcacactgctatatttgtcaaacggagcatacaaaagacgttgaaaaactgaaacgggacatccgcgcgatcaaaccgacagtgatgcaggcaacccccgctacgtggaagatgctcttttattcaggctgggaaaatgaagagagcgtgaaaattttatgcggtggcgaagcattgcctgagacattaaaacgatatttcttagatacgggcagcgaagcctggaatatgttcgggccaaccgaaacaactatctggtcagcggttcagcgcattaacgttgaatgctctcatgccacgataggaaggccaatcgccaatacacaaatctatattacggattctcagctcgcgccagtgccggcaggtgttccgggtgagctgtgcattgcaggagacggtgtggcgaagggctactacaaaaaggaagaattaacggattcgagattcattgacaacccttttgagcctgggtctaagctttatagaacgggagacatggcccgttggcttacgggagggcgaattgaatatataggccgcatcgataatcaagtaaaaatccgcggattccgtattgaacttggtgatattgaaagcaggcttagtgagcatcccggcattctggaatgcgttgtggtcgcagatatggataacctagctgcctattatacagctaaacatgcaaatgcttctctcacagcgagagagctgcgtcattttgtgaaaaacgctttgcctgcctatatggtgccttcttattttattcagcttgatcatatgccgttaactccgaacggaaagatagatagaaacagccttaagaatatcgatttatcaggggagcagctaaagcaaaggcagacctctcctaagaacattcaggatactgtttttaccatttggcaggaagtgctgaaaacgagtgacattgaatgggatgacttctttgcgctcggagggcattccttgaaggccatgaccgccgcgtcccgcatcaagaaagagctcgggattgatcttccagtgaagcttttgtttgaagcgccgacgatcgccggcatttcagcgtatttgaaaaacgggggctctgatggcttgcaggatgtaacgataatgaatcaggatcaggagcagatcattttcgcatttccgccggttctgggctatggccttatgtaccaaaatctgtccagccgcttgccgtcatacaagctatgcgcctttgattttattgaggaggaagaccggcttgaccgctatgcggatttgatccagaagctgcagccggaagggcctttaacattgtttggatattcagcgggatgcagcctggcgtttgaagctgcgaaaaagcttgaggaacaaggccgtattgttcagcggatcatcatggtggattcctataaaaaacaaggtgtcagtgatctggacggacgcacggttgaaagtgatgtcgaagcgttgatgaatgtcaatcgggacaatgaagcgctcaacagcgaagccgtcaaacacggcctcaagcaaaaaacacatgccttttactcatactacgtcaacctgatcagcacaggccaggtgaaagcagatattgatctgttgacttccggcgctgattttgacatgccggaatggcttgcatcatgggaagaagctacaacaggtgtttaccgtgtgaaaagaggcttcggaacacacgcagaaatgctgcagggcgaaacgctagataggaatgcggagattttgctcgaatttcttaatacacaaaccgtaacggtttcataa

SEQ ID NO: 14 - DNA, 3783 bp, Artificial Sequence
  Description of Artificial Sequence: Synthetic polynucleotide
cctttaacggatgcacaaaaacgaatttggtacacagaaaaattttatcctcacacgagcatttcaaatcttgcggggattggtaagctggtttcagctgatgcgattgattatgtgcttgttgagcaggcgattcaagagtttattcgcagaaatgacgccatgcgccttcggttgcggctagatgaaaacggggagcctgttcaatatattagcgagtatcggcctgttgatataaaacatactgacactactgaagatccgaatgcgatagagtttatttcacaatggagccgggaggaaacgaagaaacctttgccgctatacgattgtgatttgttccgtttttccttgttcaccataaaggaaaatgaagtgtggttttacgcaaatgttcatcacgtgatttctgatggtatctccatgaatattctcgggaatgcgatcatgcacatttatttagaattagccagcggctcagagacaaaagaaggaatctcgcattcatttatcgatcatgttttatctgaacaggaatatgctcaatcgaagcggtttgaaaaggacaaggcgttttggaacaaacaatttgaatcggtgcctgaacttgtttccttgaaacggaatgcatccgcagggggaagtttagatgctgagaggttctctaaagatgtgcctgaagcgcttcatcagcagattctgtcgttttgtgaggcgaataaagtcagtgttctttcggtatttcaatcgctgctcgccgcctatttgtacagggtcagcggccagaatgatgttgtgacgggaacatttatgggcaaccggacaaatgcgaaagagaagcagatgcttggcatgtttgtttctacggttccgcttcggacaaacattgacggcgggcaggcgttttcagaatttgtcaaagaccggatgaaggatctgatgaagacacttcgccaccaaaagtatccgtataatctcctaatcaacgatttgcgtgaaacaaagagctctctgaccaagctgttcacggtttctcttgaatatcaagtgatgcagtggcagaaagaagaggatcttgcctttttgactgagccgattttcagcggcagcggattaaatgatgtctcaattcatgtaaaggatcgatgggatactgggaaactcaccatagattttgattaccgcactgatttattttcacgtgaagaaatcaacatgatttgtgagcgcatgattaccatgctggagaacgcgttaacgcatccagaacatacaattgatgaattaacactgatttctgatgcggagaagcagatgattctcaaaacatggaacgccacaggaaaaacgtatccatatataacttttcatgagttgtttgagcagcaggcgaaaaagacgcctgatagagcggctgtcagctatgaaggtcaaacattgacgtatcgggagcttgatgagaaaagcacacagctggccatttatttgcaggcgcatggagtgggtcctgaccgtctggcggggatctatgtggatcgatcgctggacatgctagtgggtttattagcgatcctcaaggctgggggagcgtatgtgccgctagacccgtcctatccggctgaacgattagaatacatgcttgaggacagtgaagttttcattacactgacgacatcggaattagtaaatacgttgagttggaacggtgtcacaacagcccttttagatcaagattgggatgaaattgctcaaacagcctctgatcgaaaagtgcttacacgcactgtcacgccagagaacttggcatatgtcatttatacatccggcagcacaggaaagccaaaaggtgtcatgataccacataaagctttgacaaactttctcgtttcgatgggggaaacaccaggtcttacggcagaggataaaatgcttgctgtcacaacctactgttttgatattgcagctctggaattatttttgcctttaataaagggcgcacactgctatatttgtcaaacggagcatacaaaagacgttgaaaaactgaaacgggacatccgcgcgatcaaaccgacagtgatgcaggcaacccccgctacgtggaagatgctcttttattcaggctgggaaaatgaagagagcgtgaaaattttatgcggtggcgaagcattgcctgagacattaaaacgatatttcttagatacgggcagcgaagcctggaatatgttcgggccaaccgaaacaactatctggtcagcggttcagcgcattaacgttgaatgctctcatgccacgataggaaggccaatcgccaatacacaaatctatattacggattctcagctcgcgccagtgccggcaggtgttccgggtgagctgtgcattgcaggagacggtgtggcgaagggctactacaaaaaggaagaattaacggattcgagattcattgacaacccttttgagcctgggtctaagctttatagaacgggagacatggcccgttggcttacgggagggcgaattgaatatataggccgcatcgataatcaagtaaaaatccgcggattccgtattgaacttggtgatattgaaagcaggcttagtgagcatcccggcattctggaatgcgttgtggtcgcagatatggataacctagctgcctattatacagctaaacatgcaaatgcttctctcacagcgagagagctgcgtcattttgtgaaaaacgctttgcctgcctatatggtgccttcttattttattcagcttgatcatatgccgttaactccgaacggaaagatagatagaaacagccttaagaatatcgatttatcaggggagcagctaaagcaaaggcagacctctcctaagaacattcaggatactgtttttaccatttggcaggaagtgctgaacgttgagaaggcggggatctttgacttctttgcgctcggagggcattccttgaaggccatgaccgccgcgtcccgcatcaagaaagagctcgggattgatcttccagtgaagcttttgtttgaagcgccgacgatcgccggcatttcagcgtatttgaaaaacgggggctctgatggcttgcaggatgtaacgataatgaatcaggatcaggagcagatcattttcgcatttccgccggttctgggctatggccttatgtaccaaaatctgtccagccgcttgccgtcatacaagctatgcgcctttgattttattgaggaggaagaccggcttgaccgctatgcggatttgatccagaagctgcagccggaagggcctttaacattgtttggatattcagcgggatgcagcctggcgtttgaagctgcgaaaaagcttgaggaacaaggccgtattgttcagcggatcatcatggtggattcctataaaaaacaaggtgtcagtgatctggacggacgcacggttgaaagtgatgtcgaagcgttgatgaatgtcaatcgggacaatgaagcgctcaacagcgaagccgtcaaacacggcctcaagcaaaaaacacatgccttttactcatactacgtcaacctgatcagcacaggccaggtgaaagcagatattgatctgttgacttccggcgctgattttgacatgccggaatggcttgcatcatgggaagaagctacaacaggtgtttaccgtgtgaaaagaggcttcggaacacacgcagaaatgctgcagggcgaaacgctagataggaatgcggagattttgctcgaatttcttaatacacaaaccgtaacggtttcataa

SEQ ID NO: 15 - DNA, 3792 bp, Artificial Sequence
  Description of Artificial Sequence: Synthetic polynucleotide
cctttaacggatgcacaaaaacgaatttggtacacagaaaaattttatcctcacacgagcatttcaaatcttgcggggattggtaagctggtttcagctgatgcgattgattatgtgcttgttgagcaggcgattcaagagtttattcgcagaaatgacgccatgcgccttcggttgcggctagatgaaaacggggagcctgttcaatatattagcgagtatcggcctgttgatataaaacatactgacactactgaagatccgaatgcgatagagtttatttcacaatggagccgggaggaaacgaagaaacctttgccgctatacgattgtgatttgttccgtttttccttgttcaccataaaggaaaatgaagtgtggttttacgcaaatgttcatcacgtgatttctgatggtatctccatgaatattctcgggaatgcgatcatgcacatttatttagaattagccagcggctcagagacaaaagaaggaatctcgcattcatttatcgatcatgttttatctgaacaggaatatgctcaatcgaagcggtttgaaaaggacaaggcgttttggaacaaacaatttgaatcggtgcctgaacttgtttccttgaaacggaatgcatccgcagggggaagtttagatgctgagaggttctctaaagatgtgcctgaagcgcttcatcagcagattctgtcgttttgtgaggcgaataaagtcagtgttctttcggtatttcaatcgctgctcgccgcctatttgtacagggtcagcggccagaatgatgttgtgacgggaacatttatgggcaaccggacaaatgcgaaagagaagcagatgcttggcatgtttgtttctacggttccgcttcggacaaacattgacggcgggcaggcgttttcagaatttgtcaaagaccggatgaaggatctgatgaagacacttcgccaccaaaagtatccgtataatctcctaatcaacgatttgcgtgaaacaaagagctctctgaccaagctgttcacggtttctcttgaatatcaagtgatgcagtggcagaaagaagaggatcttgcctttttgactgagccgattttcagcggcagcggattaaatgatgtctcaattcatgtaaaggatcgatgggatactgggaaactcaccatagattttgattaccgcactgatttattttcacgtgaagaaatcaacatgatttgtgagcgcatgattaccatgctggagaacgcgttaacgcatccagaacatacaattgatgaattaacactgatttctgatgcggagaaagaaaaagtcatttctaaatggaatgagacggcaaaatccgagaagctggtcagccttcaggacatgttcgaaaagcaggcagttcttacgccagaacgtatcgctctcatgtgtgatgacattcaagtcaactatcgaaagctcaatgaagaggcaaaccgcctcgcgcgtctgttgatcgaaaaagggattggtccggagcaatttgtcgctttggcgctgccgcgttcccctgagatggtggcttcaatgcttggtgtgctcaagactggtgcggcgtatctcccccttgatccggagtttccagccgaccgcatttcttacatgctggaggatgcgaaaccttcatgcatcataacgactgaggaaatagcagccagtctgcctgatgacctggctgtacctgagcttgtgcttgatcaggctgttacacaggagattataaaacgctattcgccggaaaatcaggatgtatcggtttcgcttgaccatcctgcgtatatcatctatacctcaggatcaacaggaagaccgaagggagtcgttgtgacacagaaaagcttaagcaattttctgctgtctatgcaggaggcattttctctaggagaagaagacaggctgttggctgtgacgactgtcgcttttgatatttcagcattggagttatatcttccgctgattagcggagcgcaaatcgtgatcgcaaagaaagaaacgatccgtgagccgcaggcattagctcaaatgattgaaaatttcgatattaacattatgcaggcgacaccgacactgtggcacgctttggtaacgagtgaacctgagaaacttcgggggcttagagtgcttgtaggaggcgaggcgctgccgagcggtcttttgcaggaacttcaagaccttcattgttcagtcacgaacttatacggtcccactgaaacaacgatttggtctgccgcagcttttcttgaagaagggctgaagggcgttcctccgattgggaaaccgatttggaacacgcaggtgtatgtgcttgataatggattgcagccggtgccgccgggcgttgtcggagagctttatattgcaggaaccggcttggccagaggttatttccatcgtcctgatttaacggcggagcgcttcgttgcagatccatacggaccgccgggaactcggatgtatcggaccggagaccaggcccgctggcgcgccgatgggtctttggattatatcgggcgggcggatcatcaaatcaaaattcgcggattccgaattgaacttggagaaattgatgccgtgcttgccaatcacccgcacattgaacaggccgcggttgtcgtacgggaagatcagccgggagacaaacgattggcggcttatgtagtcgctgatgctgctattgatactgcagagcttcgtcgttatatgggggctagtcttcctgattatatggtaccgtcggcgtttgtggagatggacgagctgccgttaacacctaatggcaagcttgaccggaaagcactgccggcaccagacttcagcacatctgtcagtgatcgggccccgcggactcctcaggaagagatattgtgtgacttgtttgcagaggttctcggtttggcacgcgtcggtatcgatgacttctttgcgctcggagggcattccttgaaggccatgaccgccgcgtcccgcatcaagaaagagctcgggattgatcttccagtgaagcttttgtttgaagcgccgacgatcgccggcatttcagcgtatttgaaaaacgggggctctgatggcttgcaggatgtaacgataatgaatcaggatcaggagcagatcattttcgcatttccgccggttctgggctatggccttatgtaccaaaatctgtccagccgcttgccgtcatacaagctatgcgcctttgattttattgaggaggaagaccggcttgaccgctatgcggatttgatccagaagctgcagccggaagggcctttaacattgtttggatattcagcgggatgcagcctggcgtttgaagctgcgaaaaagcttgaggaacaaggccgtattgttcagcggatcatcatggtggattcctataaaaaacaaggtgtcagtgatctggacggacgcacggttgaaagtgatgtcgaagcgttgatgaatgtcaatcgggacaatgaagcgctcaacagcgaagccgtcaaacacggcctcaagcaaaaaacacatgccttttactcatactacgtcaacctgatcagcacaggccaggtgaaagcagatattgatctgttgacttccggcgctgattttgacatgccggaatggcttgcatcatgggaagaagctacaacaggtgtttaccgtgtgaaaagaggcttcggaacacacgcagaaatgctgcagggcgaaacgctagataggaatgcggagattttgctcgaatttcttaatacacaaaccgtaacggtttcataa

SEQ ID NO: 16 - DNA, 5259 bp, Artificial Sequence
  Description of Artificial Sequence: Synthetic polynucleotide
gaattcgcatgcatcgacaaaaatgtcatgaaagaatcgttgtaagacgctcttcgcaagggtgtctttttttgcctttttttcggtttttgcgcggtacacatagtcatgtaaagattgtaaattgcattcagcaataaaaaaagattgaacgcagcagtttggtttaaaaatttttatttttctgtaaataatgtttagtggaaatgattgcggcatcccgcaaaaaatattgctgtaaataaactggaatctttcggcatcccgcatgaaacttttcacccatttttcggtgataaaaacatttttttcatttaaactgaacggtagaaagataaaaaatattgaaaacaatgaataaatagccaaaattggtttcttattagggtggggtcttgcggtctttatccgcttatgttaaacgccgcaatgctgactgacggcagcctgctttaatagcggccatctgttttttgattggaagcactgctttttaagtgtagtactttgggctatttcggctgttagttcataagaattaaaagctgatatggataagaaagagaaaatgcgttgcacatgttcactgcttataaagattaggggaggtatgacaatatggaaataactttttaccctttaacggatgcacaaaaacgaatttggtacacagaaaaattttatcctcacacgagcatttcaaatcttgcggggattggtaagctggtttcagctgatgcgattgattatgtgcttgttgagcaggcgattcaagagtttattcgcagaaatgacgccatgcgccttcggttgcggctagatgaaaacggggagcctgttcaatatattagcgagtatcggcctgttgatataaaacatactgacactactgaagatccgaatgcgatagagtttatttcacaatggagccgggaggaaacgaagaaacctttgccgctatacgattgtgatttgttccgtttttccttgttcaccataaaggaaaatgaagtgtggttttacgcaaatgttcatcacgtgatttctgatggtatctccatgaatattctcgggaatgcgatcatgcacatttatttagaattagccagcggctcagagacaaaagaaggaatctcgcattcatttatcgatcatgttttatctgaacaggaatatgctcaatcgaagcggtttgaaaaggacaaggcgttttggaacaaacaatttgaatcggtgcctgaacttgtttccttgaaacggaatgcatccgcagggggaagtttagatgctgagaggttctctaaagatgtgcctgaagcgcttcatcagcagattctgtcgttttgtgaggcgaataaagtcagtgttctttcggtatttcaatcgctgctcgccgcctatttgtacagggtcagcggccagaatgatgttgtgacgggaacatttatgggcaaccggacaaatgcgaaagagaagcagatgcttggcatgtttgtttctacggttccgcttcggacaaacattgacggcgggcaggcgttttcagaatttgtcaaagaccggatgaaggatctgatgaagacacttcgccaccaaaagtatccgtataatctcctaatcaacgatttgcgtgaaacaaagagctctctgaccaagctgttcacggtttctcttgaatatcaagtgatgcagtggcagaaagaagaggatcttgcctttttgactgagccgattttcagcggcagcggattaaatgatgtctcaattcatgtaaaggatcgatgggatactgggaaactcaccatagattttgattaccgcactgatttattttcacgtgaagaaatcaacatgatttgtgagcgcatgattaccatgctggagaacgcgttaacgcatccagaacatacaattgatgaattaacactgctgttgccagaggagaaagaaaaagtcatttctaaatggaatgagacggcaaaatccgagaagctggtcagccttcaggacatgttcgaaaagcaggcagttcttacgccagaacgtatcgctctcatgtgtgatgacattcaagtcaactatcgaaagctcaatgaagaggcaaaccgcctcgcgcgtctgttgatcgaaaaagggattggtccggagcaatttgtcgctttggcgctgccgcgttcccctgagatggtggcttcaatgcttggtgtgctcaagactggtgcggcgtatctcccccttgatccggagtttccagccgaccgcatttcttacatgctggaggatgcgaaaccttcatgcatcataacgactgaggaaatagcagccagtctgcctgatgacctggctgtacctgagcttgtgcttgatcaggctgttacacaggagattataaaacgctattcgccggaaaatcaggatgtatcggtttcgcttgaccatcctgcgtatatcatctatacctcaggatcaacaggaagaccgaagggagtcgttgtgacacagaaaagcttaagcaattttctgctgtctatgcaggaggcattttctctaggagaagaagacaggctgttggctgtgacgactgtcgcttttgatatttcagcattggagttatatcttccgctgattagcggagcgcaaatcgtgatcgcaaagaaagaaacgatccgtgagccgcaggcattagctcaaatgattgaaaatttcgatattaacattatgcaggcgacaccgacactgtggcacgctttggtaacgagtgaacctgagaaacttcgggggcttagagtgcttgtaggaggcgaggcgctgccgagcggtcttttgcaggaacttcaagaccttcattgttcagtcacgaacttatacggtcccactgaaacaacgatttggtctgccgcagcttttcttgaagaagggctgaagggcgttcctccgattgggaaaccgatttggaacacgcaggtgtatgtgcttgataatggattgcagccggtgccgccgggcgttgtcggagagctttatattgcaggaaccggcttggccagaggttatttccatcgtcctgatttaacggcggagcgcttcgttgcagatccatacggaccgccgggaactcggatgtatcggaccggagaccaggcccgctggcgcgccgatgggtctttggattatatcgggcgggcggatcatcaaatcaaaattcgcggattccgaattgaacttggagaaattgatgccgtgcttgccaatcacccgcacattgaacaggccgcggttgtcgtacgggaagatcagccgggagacaaacgattggcggcttatgtagtcgctgatgctgctattgatactgcagagcttcgtcgttatatgggggctagtcttcctgattatatggtaccgtcggcgtttgtggagatggacgagctgccgttaacacctaatggcaagcttgaccggaaagcactgccggcaccagacttcagcacatctgtcagtgatcgggccccgcggaacgagatggaagaaacaatcgcacaaatatggtctgaggttctcggcagaaagcaaattggcattcatgacgatttctttgcgctcggagggcattccttgaaggccatgaccgccgcgtcccgcatcaagaaagagctcgggattgatcttccagtgaagcttttgtttgaagcgccgacgatcgccggcatttcagcgtatttgaaaaacgggggctctgatggcttgcaggatgtaacgataatgaatcaggatcaggagcagatcattttcgcatttccgccggttctgggctatggccttatgtaccaaaatctgtccagccgcttgccgtcatacaagctatgcgcctttgattttattgaggaggaagaccggcttgaccgctatgcggatttgatccagaagctgcagccggaagggcctttaacattgtttggatattcagcgggatgcagcctggcgtttgaagctgcgaaaaagcttgaggaacaaggccgtattgttcagcggatcatcatggtggattcctataaaaaacaaggtgtcagtgatctggacggacgcacggttgaaagtgatgtcgaagcgttgatgaatgtcaatcgggacaatgaagcgctcaacagcgaagccgtcaaacacggcctcaagcaaaaaacacatgccttttactcatactacgtcaacctgatcagcacaggccaggtgaaagcagatattgatctgttgacttccggcgctgattttgacatgccggaatggcttgcatcatgggaagaagctacaacaggtgtttaccgtgtgaaaagaggcttcggaacacacgcagaaatgctgcagggcgaaacgctagataggaatgcggagattttgctcgaatttcttaatacacaaaccgtaacggtttcataaatgaagtgatgaaaggaggagacagccaatgagccaactcttcaaatcatttgatgcgtcggaaaaaacacagctcatctgttttccgtttgccggcggctattcggcgtcgtttcgccctctccatgcttttttgcagggggagtgcgagatgctcgctgccgagccgccgggacacggcacgaatcaaacgtcagccattgaggatctcgaagagctgacggatttgtacaagcaagaactgaaccttcgccctgatcggccgtttgtgctgttcggacacagtatgggcggaatgatcaccttcaggctggcgcaaaagcttgagcgtgaaggcatctttccgcaggcggttatcatttctgcaatccagccgcctcatattcagcggaagaaagtgtcccacctgcctgatgatcagtttctcgatcatattatccaattaggcggaatgcccgcagagcttgttgaaaataaggaggtcatgtcctttttcctgccttctttccgatcagattaccgggctcttgaacaatttgagctttacgatctggcccagatccagtcgcctgttcatgtctttaacgggcttgatgataaaaaatgcatacgagatgcggaagggtggaagaagtgggcaaaagacatcacattccatcaatttgacggcgggcacatgttcctgctgtcacaaacggaagaagtcgcagaacggatttttgcgatcttgaatcagcatccgatcattcaaccgtgaagccgccccgcagggcgctccgcaggccgcttccggaccactccggaagcggccgtgcggtcggaggatcc

SEQ ID NO: 17 - DNA, 5259 bp, Artificial Sequence
  Description of Artificial Sequence: Synthetic polynucleotide
gaattcgcatgcatcgacaaaaatgtcatgaaagaatcgttgtaagacgctcttcgcaagggtgtctttttttgcctttttttcggtttttgcgcggtacacatagtcatgtaaagattgtaaattgcattcagcaataaaaaaagattgaacgcagcagtttggtttaaaaatttttatttttctgtaaataatgtttagtggaaatgattgcggcatcccgcaaaaaatattgctgtaaataaactggaatctttcggcatcccgcatgaaacttttcacccatttttcggtgataaaaacatttttttcatttaaactgaacggtagaaagataaaaaatattgaaaacaatgaataaatagccaaaattggtttcttattagggtggggtcttgcggtctttatccgcttatgttaaacgccgcaatgctgactgacggcagcctgctttaatagcggccatctgttttttgattggaagcactgctttttaagtgtagtactttgggctatttcggctgttagttcataagaattaaaagctgatatggataagaaagagaaaatgcgttgcacatgttcactgcttataaagattaggggaggtatgacaatatggaaataactttttaccctttaacggatgcacaaaaacgaatttggtacacagaaaaattttatcctcacacgagcatttcaaatcttgcggggattggtaagctggtttcagctgatgcgattgattatgtgcttgttgagcaggcgattcaagagtttattcgcagaaatgacgccatgcgccttcggttgcggctagatgaaaacggggagcctgttcaatatattagcgagtatcggcctgttgatataaaacatactgacactactgaagatccgaatgcgatagagtttatttcacaatggagccgggaggaaacgaagaaacctttgccgctatacgattgtgatttgttccgtttttccttgttcaccataaaggaaaatgaagtgtggttttacgcaaatgttcatcacgtgatttctgatggtatctccatgaatattctcgggaatgcgatcatgcacatttatttagaattagccagcggctcagagacaaaagaaggaatctcgcattcatttatcgatcatgttttatctgaacaggaatatgctcaatcgaagcggtttgaaaaggacaaggcgttttggaacaaacaatttgaatcggtgcctgaacttgtttccttgaaacggaatgcatccgcagggggaagtttagatgctgagaggttctctaaagatgtgcctgaagcgcttcatcagcagattctgtcgttttgtgaggcgaataaagtcagtgttctttcggtatttcaatcgctgctcgccgcctatttgtacagggtcagcggccagaatgatgttgtgacgggaacatttatgggcaaccggacaaatgcgaaagagaagcagatgcttggcatgtttgtttctacggttccgcttcggacaaacattgacggcgggcaggcgttttcagaatttgtcaaagaccggatgaaggatctgatgaagacacttcgccaccaaaagtatccgtataatctcctaatcaacgatttgcgtgaaacaaagagctctctgaccaagctgttcacggtttctcttgaatatcaagtgatgcagtggcagaaagaagaggatcttgcctttttgactgagccgattttcagcggcagcggattaaatgatgtctcaattcatgtaaaggatcgatgggatactgggaaactcaccatagattttgattaccgcactgatttattttcacgtgaagaaatcaacatgatttgtgagcgcatgattaccatgctggagaacgcgttaacgcatccagaacatacaattgatgaattaacactgctgttgccagaggagaaagaaaaagtcatttctaaatggaatgagacggcaaaatccgagaagctggtcagccttcaggacatgttcgaaaagcaggcagttcttacgccagaacgtatcgctctcatgtgtgatgacattcaagtcaactatcgaaagctcaatgaagaggcaaaccgcctcgcgcgtctgttgatcgaaaaagggattggtccggagcaatttgtcgctttggcgctgccgcgttcccctgagatggtggcttcaatgcttggtgtgctcaagactggtgcggcgtatctcccccttgatccggagtttccagccgaccgcatttcttacatgctggaggatgcgaaaccttcatgcatcataacgactgaggaaatagcagccagtctgcctgatgacctggctgtacctgagcttgtgcttgatcaggctgttacacaggagattataaaacgctattcgccggaaaatcaggatgtatcggtttcgcttgaccatcctgcgtatatcatctatacctcaggatcaacaggaagaccgaagggagtcgttgtgacacagaaaagcttaagcaattttctgctgtctatgcaggaggcattttctctaggagaagaagacaggctgttggctgtgacgactgtcgcttttgatatttcagcattggagttatatcttccgctgattagcggagcgcaaatcgtgatcgcaaagaaagaaacgatccgtgagccgcaggcattagctcaaatgattgaaaatttcgatattaacattatgcaggcgacaccgacactgtggcacgctttggtaacgagtgaacctgagaaacttcgggggcttagagtgcttgtaggaggcgaggcgctgccgagcggtcttttgcaggaacttcaagaccttcattgttcagtcacgaacttatacggtcccactgaaacaacgatttggtctgccgcagcttttcttgaagaagggctgaagggcgttcctccgattgggaaaccgatttggaacacgcaggtgtatgtgcttgataatggattgcagccggtgccgccgggcgttgtcggagagctttatattgcaggaaccggcttggccagaggttatttccatcgtcctgatttaacggcggagcgcttcgttgcagatccatacggaccgccgggaactcggatgtatcggaccggagaccaggcccgctggcgcgccgatgggtctttggattatatcgggcgggcggatcatcaaatcaaaattcgcggattccgaattgaacttggagaaattgatgccgtgcttgccaatcacccgcacattgaacaggccgcggttgtcgtacgggaagatcagccgggagacaaacgattggcggcttatgtagtcgctgatgctgctattgatactgcagagcttcgtcgttatatgggggctagtcttcctgattatatggtaccgtcggcgtttgtggagatggacgagctgccgttaacacctaatggcaagcttgaccggaaagcactgccggcaccagacttcagcacatctgtcagtgatcgggccccgcggactcctcaggaagagatattgtgtgacttgtttgcagaggttctcggtttggcacgcgtcggtatcgatgacgatttctttgcgctcggagggcattccttgaaggccatgaccgccgcgtcccgcatcaagaaagagctcgggattgatcttccagtgaagcttttgtttgaagcgccgacgatcgccggcatttcagcgtatttgaaaaacgggggctctgatggcttgcaggatgtaacgataatgaatcaggatcaggagcagatcattttcgcatttccgccggttctgggctatggccttatgtaccaaaatctgtccagccgcttgccgtcatacaagctatgcgcctttgattttattgaggaggaagaccggcttgaccgctatgcggatttgatccagaagctgcagccggaagggcctttaacattgtttggatattcagcgggatgcagcctggcgtttgaagctgcgaaaaagcttgaggaacaaggccgtattgttcagcggatcatcatggtggattcctataaaaaacaaggtgtcagtgatctggacggacgcacggttgaaagtgatgtcgaagcgttgatgaatgtcaatcgggacaatgaagcgctcaacagcgaagccgtcaaacacggcctcaagcaaaaaacacatgccttttactcatactacgtcaacctgatcagcacaggccaggtgaaagcagatattgatctgttgacttccggcgctgattttgacatgccggaatggcttgcatcatgggaagaagctacaacaggtgtttaccgtgtgaaaagaggcttcggaacacacgcagaaatgctgcagggcgaaacgctagataggaatgcggagattttgctcgaatttcttaatacacaaaccgtaacggtttcataaatgaagtgatgaaaggaggagacagccaatgagccaactcttcaaatcatttgatgcgtcggaaaaaacacagctcatctgttttccgtttgccggcggctattcggcgtcgtttcgccctctccatgcttttttgcagggggagtgcgagatgctcgctgccgagccgccgggacacggcacgaatcaaacgtcagccattgaggatctcgaagagctgacggatttgtacaagcaagaactgaaccttcgccctgatcggccgtttgtgctgttcggacacagtatgggcggaatgatcaccttcaggctggcgcaaaagcttgagcgtgaaggcatctttccgcaggcggttatcatttctgcaatccagccgcctcatattcagcggaagaaagtgtcccacctgcctgatgatcagtttctcgatcatattatccaattaggcggaatgcccgcagagcttgttgaaaataaggaggtcatgtcctttttcctgccttctttccgatcagattaccgggctcttgaacaatttgagctttacgatctggcccagatccagtcgcctgttcatgtctttaacgggcttgatgataaaaaatgcatacgagatgcggaagggtggaagaagtgggcaaaagacatcacattccatcaatttgacggcgggcacatgttcctgctgtcacaaacggaagaagtcgcagaacggatttttgcgatcttgaatcagcatccgatcattcaaccgtgaagccgccccgcagggcgctccgcaggccgcttccggaccactccggaagcggccgtgcggtcggaggatcc

SEQ ID NO: 18 - DNA, 5259 bp, Artificial Sequence
  Description of Artificial Sequence: Synthetic polynucleotide
gaattcgcatgcatcgacaaaaatgtcatgaaagaatcgttgtaagacgctcttcgcaagggtgtctttttttgcctttttttcggtttttgcgcggtacacatagtcatgtaaagattgtaaattgcattcagcaataaaaaaagattgaacgcagcagtttggtttaaaaatttttatttttctgtaaataatgtttagtggaaatgattgcggcatcccgcaaaaaatattgctgtaaataaactggaatctttcggcatcccgcatgaaacttttcacccatttttcggtgataaaaacatttttttcatttaaactgaacggtagaaagataaaaaatattgaaaacaatgaataaatagccaaaattggtttcttattagggtggggtcttgcggtctttatccgcttatgttaaacgccgcaatgctgactgacggcagcctgctttaatagcggccatctgttttttgattggaagcactgctttttaagtgtagtactttgggctatttcggctgttagttcataagaattaaaagctgatatggataagaaagagaaaatgcgttgcacatgttcactgcttataaagattaggggaggtatgacaatatggaaataactttttaccctttaacggatgcacaaaaacgaatttggtacacagaaaaattttatcctcacacgagcatttcaaatcttgcggggattggtaagctggtttcagctgatgcgattgattatgtgcttgttgagcaggcgattcaagagtttattcgcagaaatgacgccatgcgccttcggttgcggctagatgaaaacggggagcctgttcaatatattagcgagtatcggcctgttgatataaaacatactgacactactgaagatccgaatgcgatagagtttatttcacaatggagccgggaggaaacgaagaaacctttgccgctatacgattgtgatttgttccgtttttccttgttcaccataaaggaaaatgaagtgtggttttacgcaaatgttcatcacgtgatttctgatggtatctccatgaatattctcgggaatgcgatcatgcacatttatttagaattagccagcggctcagagacaaaagaaggaatctcgcattcatttatcgatcatgttttatctgaacaggaatatgctcaatcgaagcggtttgaaaaggacaaggcgttttggaacaaacaatttgaatcggtgcctgaacttgtttccttgaaacggaatgcatccgcagggggaagtttagatgctgagaggttctctaaagatgtgcctgaagcgcttcatcagcagattctgtcgttttgtgaggcgaataaagtcagtgttctttcggtatttcaatcgctgctcgccgcctatttgtacagggtcagcggccagaatgatgttgtgacgggaacatttatgggcaaccggacaaatgcgaaagagaagcagatgcttggcatgtttgtttctacggttccgcttcggacaaacattgacggcgggcaggcgttttcagaatttgtcaaagaccggatgaaggatctgatgaagacacttcgccaccaaaagtatccgtataatctcctaatcaacgatttgcgtgaaacaaagagctctctgaccaagctgttcacggtttctcttgaatatcaagtgatgcagtggcagaaagaagaggatcttgcctttttgactgagccgattttcagcggcagcggattaaatgatgtctcaattcatgtaaaggatcgatgggatactgggaaactcaccatagattttgattaccgcactgatttattttcacgtgaagaaatcaacatgatttgtgagcgcatgattaccatgctggagaacgcgttaacgcatccagaacatacaattgatgaattaacactgatttctgatgcggagaaagaaaaagtcatttctaaatggaatgagacggcaaaatccgagaagctggtcagccttcaggacatgttcgaaaagcaggcagttcttacgccagaacgtatcgctctcatgtgtgatgacattcaagtcaactatcgaaagctcaatgaagaggcaaaccgcctcgcgcgtctgttgatcgaaaaagggattggtccggagcaatttgtcgctttggcgctgccgcgttcccctgagatggtggcttcaatgcttggtgtgctcaagactggtgcggcgtatctcccccttgatccggagtttccagccgaccgcatttcttacatgctggaggatgcgaaaccttcatgcatcataacgactgaggaaatagcagccagtctgcctgatgacctggctgtacctgagcttgtgcttgatcaggctgttacacaggagattataaaacgctattcgccggaaaatcaggatgtatcggtttcgcttgaccatcctgcgtatatcatctatacctcaggatcaacaggaagaccgaagggagtcgttgtgacacagaaaagcttaagcaattttctgctgtctatgcaggaggcattttctctaggagaagaagacaggctgttggctgtgacgactgtcgcttttgatatttcagcattggagttatatcttccgctgattagcggagcgcaaatcgtgatcgcaaagaaagaaacgatccgtgagccgcaggcattagctcaaatgattgaaaatttcgatattaacattatgcaggcgacaccgacactgtggcacgctttggtaacgagtgaacctgagaaacttcgggggcttagagtgcttgtaggaggcgaggcgctgccgagcggtcttttgcaggaacttcaagaccttcattgttcagtcacgaacttatacggtcccactgaaacaacgatttggtctgccgcagcttttcttgaagaagggctgaagggcgttcctccgattgggaaaccgatttggaacacgcaggtgtatgtgcttgataatggattgcagccggtgccgccgggcgttgtcggagagctttatattgcaggaaccggcttggccagaggttatttccatcgtcctgatttaacggcggagcgcttcgttgcagatccatacggaccgccgggaactcggatgtatcggaccggagaccaggcccgctggcgcgccgatgggtctttggattatatcgggcgggcggatcatcaaatcaaaattcgcggattccgaattgaacttggagaaattgatgccgtgcttgccaatcacccgcacattgaacaggccgcggttgtcgtacgggaagatcagccgggagacaaacgattggcggcttatgtagtcgctgatgctgctattgatactgcagagcttcgtcgttatatgggggctagtcttcctgattatatggtaccgtcggcgtttgtggagatggacgagctgccgttaacacctaatggcaagcttgaccggaaagcactgccggcaccagacttcagcacatctgtcagtgatcgggccccgcggactcctcaggaagagatattgtgtgacttgtttgcagaggttctcggcagaaagcaaattggcattcatgacgatttctttgcgctcggagggcattccttgaaggccatgaccgccgcgtcccgcatcaagaaagagctcgggattgatcttccagtgaagcttttgtttgaagcgccgacgatcgccggcatttcagcgtatttgaaaaacgggggctctgatggcttgcaggatgtaacgataatgaatcaggatcaggagcagatcattttcgcatttccgccggttctgggctatggccttatgtaccaaaatctgtccagccgcttgccgtcatacaagctatgcgcctttgattttattgaggaggaagaccggcttgaccgctatgcggatttgatccagaagctgcagccggaagggcctttaacattgtttggatattcagcgggatgcagcctggcgtttgaagctgcgaaaaagcttgaggaacaaggccgtattgttcagcggatcatcatggtggattcctataaaaaacaaggtgtcagtgatctggacggacgcacggttgaaagtgatgtcgaagcgttgatgaatgtcaatcgggacaatgaagcgctcaacagcgaagccgtcaaacacggcctcaagcaaaaaacacatgccttttactcatactacgtcaacctgatcagcacaggccaggtgaaagcagatattgatctgttgacttccggcgctgattttgacatgccggaatggcttgcatcatgggaagaagctacaacaggtgtttaccgtgtgaaaagaggcttcggaacacacgcagaaatgctgcagggcgaaacgctagataggaatgcggagattttgctcgaatttcttaatacacaaaccgtaacggtttcataaatgaagtgatgaaaggaggagacagccaatgagccaactcttcaaatcatttgatgcgtcggaaaaaacacagctcatctgttttccgtttgccggcggctattcggcgtcgtttcgccctctccatgcttttttgcagggggagtgcgagatgctcgctgccgagccgccgggacacggcacgaatcaaacgtcagccattgaggatctcgaagagctgacggatttgtacaagcaagaactgaaccttcgccctgatcggccgtttgtgctgttcggacacagtatgggcggaatgatcaccttcaggctggcgcaaaagcttgagcgtgaaggcatctttccgcaggcggttatcatttctgcaatccagccgcctcatattcagcggaagaaagtgtcccacctgcctgatgatcagtttctcgatcatattatccaattaggcggaatgcccgcagagcttgttgaaaataaggaggtcatgtcctttttcctgccttctttccgatcagattaccgggctcttgaacaatttgagctttacgatctggcccagatccagtcgcctgttcatgtctttaacgggcttgatgataaaaaatgcatacgagatgcggaagggtggaagaagtgggcaaaagacatcacattccatcaatttgacggcgggcacatgttcctgctgtcacaaacggaagaagtcgcagaacggatttttgcgatcttgaatcagcatccgatcattcaaccgtgaagccgccccgcagggcgctccgcaggccgcttccggaccactccggaagcggccgtgcggtcggaggatcc

SEQ ID NO: 19 - DNA, 5259 bp, Artificial Sequence
  Description of Artificial Sequence: Synthetic polynucleotide
gaattcgcatgcatcgacaaaaatgtcatgaaagaatcgttgtaagacgctcttcgcaagggtgtctttttttgcctttttttcggtttttgcgcggtacacatagtcatgtaaagattgtaaattgcattcagcaataaaaaaagattgaacgcagcagtttggtttaaaaatttttatttttctgtaaataatgtttagtggaaatgattgcggcatcccgcaaaaaatattgctgtaaataaactggaatctttcggcatcccgcatgaaacttttcacccatttttcggtgataaaaacatttttttcatttaaactgaacggtagaaagataaaaaatattgaaaacaatgaataaatagccaaaattggtttcttattagggtggggtcttgcggtctttatccgcttatgttaaacgccgcaatgctgactgacggcagcctgctttaatagcggccatctgttttttgattggaagcactgctttttaagtgtagtactttgggctatttcggctgttagttcataagaattaaaagctgatatggataagaaagagaaaatgcgttgcacatgttcactgcttataaagattaggggaggtatgacaatatggaaataactttttaccctttaacggatgcacaaaaacgaatttggtacacagaaaaattttatcctcacacgagcatttcaaatcttgcggggattggtaagctggtttcagctgatgcgattgattatgtgcttgttgagcaggcgattcaagagtttattcgcagaaatgacgccatgcgccttcggttgcggctagatgaaaacggggagcctgttcaatatattagcgagtatcggcctgttgatataaaacatactgacactactgaagatccgaatgcgatagagtttatttcacaatggagccgggaggaaacgaagaaacctttgccgctatacgattgtgatttgttccgtttttccttgttcaccataaaggaaaatgaagtgtggttttacgcaaatgttcatcacgtgatttctgatggtatctccatgaatattctcgggaatgcgatcatgcacatttatttagaattagccagcggctcagagacaaaagaaggaatctcgcattcatttatcgatcatgttttatctgaacaggaatatgctcaatcgaagcggtttgaaaaggacaaggcgttttggaacaaacaatttgaatcggtgcctgaacttgtttccttgaaacggaatgcatccgcagggggaagtttagatgctgagaggttctctaaagatgtgcctgaagcgcttcatcagcagattctgtcgttttgtgaggcgaataaagtcagtgttctttcggtatttcaatcgctgctcgccgcctatttgtacagggtcagcggccagaatgatgttgtgacgggaacatttatgggcaaccggacaaatgcgaaagagaagcagatgcttggcatgtttgtttctacggttccgcttcggacaaacattgacggcgggcaggcgttttcagaatttgtcaaagaccggatgaaggatctgatgaagacacttcgccaccaaaagtatccgtataatctcctaatcaacgatttgcgtgaaacaaagagctctctgaccaagctgttcacggtttctcttgaatatcaagtgatgcagtggcagaaagaagaggatcttgcctttttgactgagccgattttcagcggcagcggattaaatgatgtctcaattcatgtaaaggatcgatgggatactgggaaactcaccatagattttgattaccgcactgatttattttcacgtgaagaaatcaacatgatttgtgagcgcatgattaccatgctggagaacgcgttaacgcatccagaacatacaattgatgaattaacactgatttctgatgcggagaaagaaaaagtcatttctaaatggaatgagacggcaaaatccgagaagctggtcagccttcaggacatgttcgaaaagcaggcagttcttacgccagaacgtatcgctctcatgtgtgatgacattcaagtcaactatcgaaagctcaatgaagaggcaaaccgcctcgcgcgtctgttgatcgaaaaagggattggtccggagcaatttgtcgctttggcgctgccgcgttcccctgagatggtggcttcaatgcttggtgtgctcaagactggtgcggcgtatctcccccttgatccggagtttccagccgaccgcatttcttacatgctggaggatgcgaaaccttcatgcatcataacgactgaggaaatagcagccagtctgcctgatgacctggctgtacctgagcttgtgcttgatcaggctgttacacaggagattataaaacgctattcgccggaaaatcaggatgtatcggtttcgcttgaccatcctgcgtatatcatctatacctcaggatcaacaggaagaccgaagggagtcgttgtgacacagaaaagcttaagcaattttctgctgtctatgcaggaggcattttctctaggagaagaagacaggctgttggctgtgacgactgtcgcttttgatatttcagcattggagttatatcttccgctgattagcggagcgcaaatcgtgatcgcaaagaaagaaacgatccgtgagccgcaggcattagctcaaatgattgaaaatttcgatattaacattatgcaggcgacaccgacactgtggcacgctttggtaacgagtgaacctgagaaacttcgggggcttagagtgcttgtaggaggcgaggcgctgccgagcggtcttttgcaggaacttcaagaccttcattgttcagtcacgaacttatacggtcccactgaaacaacgatttggtctgccgcagcttttcttgaagaagggctgaagggcgttcctccgattgggaaaccgatttggaacacgcaggtgtatgtgcttgataatggattgcagccggtgccgccgggcgttgtcggagagctttatattgcaggaaccggcttggccagaggttatttccatcgtcctgatttaacggcggagcgcttcgttgcagatccatacggaccgccgggaactcggatgtatcggaccggagaccaggcccgctggcgcgccgatgggtctttggattatatcgggcgggcggatcatcaaatcaaaattcgcggattccgaattgaacttggagaaattgatgccgtgcttgccaatcacccgcacattgaacaggccgcggttgtcgtacgggaagatcagccgggagacaaacgattggcggcttatgtagtcgctgatgctgctattgatactgcagagcttcgtcgttatatgggggctagtcttcctgattatatggtaccgtcggcgtttgtggagatggacgagctgccgttaacacctaatggcaagcttgaccggaaagcactgccggcaccagacttcagcacatctgtcagtgatcgggccccgcggactcctcaggaagaaacaatcgcacaaatatggtctgaggttctcggcagaaagcaaattggcattcatgacgatttctttgcgctcggagggcattccttgaaggccatgaccgccgcgtcccgcatcaagaaagagctcgggattgatcttccagtgaagcttttgtttgaagcgccgacgatcgccggcatttcagcgtatttgaaaaacgggggctctgatggcttgcaggatgtaacgataatgaatcaggatcaggagcagatcattttcgcatttccgccggttctgggctatggccttatgtaccaaaatctgtccagccgcttgccgtcatacaagctatgcgcctttgattttattgaggaggaagaccggcttgaccgctatgcggatttgatccagaagctgcagccggaagggcctttaacattgtttggatattcagcgggatgcagcctggcgtttgaagctgcgaaaaagcttgaggaacaaggccgtattgttcagcggatcatcatggtggattcctataaaaaacaaggtgtcagtgatctggacggacgcacggttgaaagtgatgtcgaagcgttgatgaatgtcaatcgggacaatgaagcgctcaacagcgaagccgtcaaacacggcctcaagcaaaaaacacatgccttttactcatactacgtcaacctgatcagcacaggccaggtgaaagcagatattgatctgttgacttccggcgctgattttgacatgccggaatggcttgcatcatgggaagaagctacaacaggtgtttaccgtgtgaaaagaggcttcggaacacacgcagaaatgctgcagggcgaaacgctagataggaatgcggagattttgctcgaatttcttaatacacaaaccgtaacggtttcataaatgaagtgatgaaaggaggagacagccaatgagccaactcttcaaatcatttgatgcgtcggaaaaaacacagctcatctgttttccgtttgccggcggctattcggcgtcgtttcgccctctccatgcttttttgcagggggagtgcgagatgctcgctgccgagccgccgggacacggcacgaatcaaacgtcagccattgaggatctcgaagagctgacggatttgtacaagcaagaactgaaccttcgccctgatcggccgtttgtgctgttcggacacagtatgggcggaatgatcaccttcaggctggcgcaaaagcttgagcgtgaaggcatctttccgcaggcggttatcatttctgcaatccagccgcctcatattcagcggaagaaagtgtcccacctgcctgatgatcagtttctcgatcatattatccaattaggcggaatgcccgcagagcttgttgaaaataaggaggtcatgtcctttttcctgccttctttccgatcagattaccgggctcttgaacaatttgagctttacgatctggcccagatccagtcgcctgttcatgtctttaacgggcttgatgataaaaaatgcatacgagatgcggaagggtggaagaagtgggcaaaagacatcacattccatcaatttgacggcgggcacatgttcctgctgtcacaaacggaagaagtcgcagaacggatttttgcgatcttgaatcagcatccgatcattcaaccgtgaagccgccccgcagggcgctccgcaggccgcttccggaccactccggaagcggccgtgcggtcggaggatcc

SEQ ID NO: 20 - DNA, 5259 bp, Artificial Sequence
  Description of Artificial Sequence: Synthetic polynucleotide
gaattcgcatgcatcgacaaaaatgtcatgaaagaatcgttgtaagacgctcttcgcaagggtgtctttttttgcctttttttcggtttttgcgcggtacacatagtcatgtaaagattgtaaattgcattcagcaataaaaaaagattgaacgcagcagtttggtttaaaaatttttatttttctgtaaataatgtttagtggaaatgattgcggcatcccgcaaaaaatattgctgtaaataaactggaatctttcggcatcccgcatgaaacttttcacccatttttcggtgataaaaacatttttttcatttaaactgaacggtagaaagataaaaaatattgaaaacaatgaataaatagccaaaattggtttcttattagggtggggtcttgcggtctttatccgcttatgttaaacgccgcaatgctgactgacggcagcctgctttaatagcggccatctgttttttgattggaagcactgctttttaagtgtagtactttgggctatttcggctgttagttcataagaattaaaagctgatatggataagaaagagaaaatgcgttgcacatgttcactgcttataaagattaggggaggtatgacaatatggaaataactttttaccctttaacggatgcacaaaaacgaatttggtacacagaaaaattttatcctcacacgagcatttcaaatcttgcggggattggtaagctggtttcagctgatgcgattgattatgtgcttgttgagcaggcgattcaagagtttattcgcagaaatgacgccatgcgccttcggttgcggctagatgaaaacggggagcctgttcaatatattagcgagtatcggcctgttgatataaaacatactgacactactgaagatccgaatgcgatagagtttatttcacaatggagccgggaggaaacgaagaaacctttgccgctatacgattgtgatttgttccgtttttccttgttcaccataaaggaaaatgaagtgtggttttacgcaaatgttcatcacgtgatttctgatggtatctccatgaatattctcgggaatgcgatcatgcacatttatttagaattagccagcggctcagagacaaaagaaggaatctcgcattcatttatcgatcatgttttatctgaacaggaatatgctcaatcgaagcggtttgaaaaggacaaggcgttttggaacaaacaatttgaatcggtgcctgaacttgtttccttgaaacggaatgcatccgcagggggaagtttagatgctgagaggttctctaaagatgtgcctgaagcgcttcatcagcagattctgtcgttttgtgaggcgaataaagtcagtgttctttcggtatttcaatcgctgctcgccgcctatttgtacagggtcagcggccagaatgatgttgtgacgggaacatttatgggcaaccggacaaatgcgaaagagaagcagatgcttggcatgtttgtttctacggttccgcttcggacaaacattgacggcgggcaggcgttttcagaatttgtcaaagaccggatgaaggatctgatgaagacacttcgccaccaaaagtatccgtataatctcctaatcaacgatttgcgtgaaacaaagagctctctgaccaagctgttcacggtttctcttgaatatcaagtgatgcagtggcagaaagaagaggatcttgcctttttgactgagccgattttcagcggcagcggattaaatgatgtctcaattcatgtaaaggatcgatgggatactgggaaactcaccatagattttgattaccgcactgatttattttcacgtgaagaaatcaacatgatttgtgagcgcatgattaccatgctggagaacgcgttaacgcatccagaacatacaattgatgaattaacactgatttctgatgcggagaaagaaaaagtcatttctaaatggaatgagacggcaaaatccgagaagctggtcagccttcaggacatgttcgaaaagcaggcagttcttacgccagaacgtatcgctctcatgtgtgatgacattcaagtcaactatcgaaagctcaatgaagaggcaaaccgcctcgcgcgtctgttgatcgaaaaagggattggtccggagcaatttgtcgctttggcgctgccgcgttcccctgagatggtggcttcaatgcttggtgtgctcaagactggtgcggcgtatctcccccttgatccggagtttccagccgaccgcatttcttacatgctggaggatgcgaaaccttcatgcatcataacgactgaggaaatagcagccagtctgcctgatgacctggctgtacctgagcttgtgcttgatcaggctgttacacaggagattataaaacgctattcgccggaaaatcaggatgtatcggtttcgcttgaccatcctgcgtatatcatctatacctcaggatcaacaggaagaccgaagggagtcgttgtgacacagaaaagcttaagcaattttctgctgtctatgcaggaggcattttctctaggagaagaagacaggctgttggctgtgacgactgtcgcttttgatatttcagcattggagttatatcttccgctgattagcggagcgcaaatcgtgatcgcaaagaaagaaacgatccgtgagccgcaggcattagctcaaatgattgaaaatttcgatattaacattatgcaggcgacaccgacactgtggcacgctttggtaacgagtgaacctgagaaacttcgggggcttagagtgcttgtaggaggcgaggcgctgccgagcggtcttttgcaggaacttcaagaccttcattgttcagtcacgaacttatacggtcccactgaaacaacgatttggtctgccgcagcttttcttgaagaagggctgaagggcgttcctccgattgggaaaccgatttggaacacgcaggtgtatgtgcttgataatggattgcagccggtgccgccgggcgttgtcggagagctttatattgcaggaaccggcttggccagaggttatttccatcgtcctgatttaacggcggagcgcttcgttgcagatccatacggaccgccgggaactcggatgtatcggaccggagaccaggcccgctggcgcgccgatgggtctttggattatatcgggcgggcggatcatcaaatcaaaattcgcggattccgaattgaacttggagaaattgatgccgtgcttgccaatcacccgcacattgaacaggccgcggttgtcgtacgggaagatcagccgggagacaaacgattggcggcttatgtagtcgctgatgctgctattgatactgcagagcttcgtcgttatatgggggctagtcttcctgattatatggtaccgtcggcgtttgtggagatggacgagctgccgttaacacctaatggcaagcttgaccggaaagcactgccggcaccagacttcagcacatctgtcagtgatcgggccccgcggaacgagatggaagaaacaatcgcacaaatatggtctgaggttctcggcagaaagcaaattggcattcatgacgatttctttgcgctcggagggcattccttgaaggccatgaccgccgcgtcccgcatcaagaaagagctcgggattgatcttccagtgaagcttttgtttgaagcgccgacgatcgccggcatttcagcgtatttgaaaaacgggggctctgatggcttgcaggatgtaacgataatgaatcaggatcaggagcagatcattttcgcatttccgccggttctgggctatggccttatgtaccaaaatctgtccagccgcttgccgtcatacaagctatgcgcctttgattttattgaggaggaagaccggcttgaccgctatgcggatttgatccagaagctgcagccggaagggcctttaacattgtttggatattcagcgggatgcagcctggcgtttgaagctgcgaaaaagcttgaggaacaaggccgtattgttcagcggatcatcatggtggattcctataaaaaacaaggtgtcagtgatctggacggacgcacggttgaaagtgatgtcgaagcgttgatgaatgtcaatcgggacaatgaagcgctcaacagcgaagccgtcaaacacggcctcaagcaaaaaacacatgccttttactcatactacgtcaacctgatcagcacaggccaggtgaaagcagatattgatctgttgacttccggcgctgattttgacatgccggaatggcttgcatcatgggaagaagctacaacaggtgtttaccgtgtgaaaagaggcttcggaacacacgcagaaatgctgcagggcgaaacgctagataggaatgcggagattttgctcgaatttcttaatacacaaaccgtaacggtttcataaatgaagtgatgaaaggaggagacagccaatgagccaactcttcaaatcatttgatgcgtcggaaaaaacacagctcatctgttttccgtttgccggcggctattcggcgtcgtttcgccctctccatgcttttttgcagggggagtgcgagatgctcgctgccgagccgccgggacacggcacgaatcaaacgtcagccattgaggatctcgaagagctgacggatttgtacaagcaagaactgaaccttcgccctgatcggccgtttgtgctgttcggacacagtatgggcggaatgatcaccttcaggctggcgcaaaagcttgagcgtgaaggcatctttccgcaggcggttatcatttctgcaatccagccgcctcatattcagcggaagaaagtgtcccacctgcctgatgatcagtttctcgatcatattatccaattaggcggaatgcccgcagagcttgttgaaaataaggaggtcatgtcctttttcctgccttctttccgatcagattaccgggctcttgaacaatttgagctttacgatctggcccagatccagtcgcctgttcatgtctttaacgggcttgatgataaaaaatgcatacgagatgcggaagggtggaagaagtgggcaaaagacatcacattccatcaatttgacggcgggcacatgttcctgctgtcacaaacggaagaagtcgcagaacggatttttgcgatcttgaatcagcatccgatcattcaaccgtgaagccgccccgcagggcgctccgcaggccgcttccggaccactccggaagcggccgtgcggtcggaggatcc

SEQ ID NO: 21 - DNA, 5259 bp, Artificial Sequence
  Description of Artificial Sequence: Synthetic polynucleotide
gaattcgcatgcatcgacaaaaatgtcatgaaagaatcgttgtaagacgctcttcgcaagggtgtctttttttgcctttttttcggtttttgcgcggtacacatagtcatgtaaagattgtaaattgcattcagcaataaaaaaagattgaacgcagcagtttggtttaaaaatttttatttttctgtaaataatgtttagtggaaatgattgcggcatcccgcaaaaaatattgctgtaaataaactggaatctttcggcatcccgcatgaaacttttcacccatttttcggtgataaaaacatttttttcatttaaactgaacggtagaaagataaaaaatattgaaaacaatgaataaatagccaaaattggtttcttattagggtggggtcttgcggtctttatccgcttatgttaaacgccgcaatgctgactgacggcagcctgctttaatagcggccatctgttttttgattggaagcactgctttttaagtgtagtactttgggctatttcggctgttagttcataagaattaaaagctgatatggataagaaagagaaaatgcgttgcacatgttcactgcttataaagattaggggaggtatgacaatatggaaataactttttaccctttaacggatgcacaaaaacgaatttggtacacagaaaaattttatcctcacacgagcatttcaaatcttgcggggattggtaagctggtttcagctgatgcgattgattatgtgcttgttgagcaggcgattcaagagtttattcgcagaaatgacgccatgcgccttcggttgcggctagatgaaaacggggagcctgttcaatatattagcgagtatcggcctgttgatataaaacatactgacactactgaagatccgaatgcgatagagtttatttcacaatggagccgggaggaaacgaagaaacctttgccgctatacgattgtgatttgttccgtttttccttgttcaccataaaggaaaatgaagtgtggttttacgcaaatgttcatcacgtgatttctgatggtatctccatgaatattctcgggaatgcgatcatgcacatttatttagaattagccagcggctcagagacaaaagaaggaatctcgcattcatttatcgatcatgttttatctgaacaggaatatgctcaatcgaagcggtttgaaaaggacaaggcgttttggaacaaacaatttgaatcggtgcctgaacttgtttccttgaaacggaatgcatccgcagggggaagtttagatgctgagaggttctctaaagatgtgcctgaagcgcttcatcagcagattctgtcgttttgtgaggcgaataaagtcagtgttctttcggtatttcaatcgctgctcgccgcctatttgtacagggtcagcggccagaatgatgttgtgacgggaacatttatgggcaaccggacaaatgcgaaagagaagcagatgcttggcatgtttgtttctacggttccgcttcggacaaacattgacggcgggcaggcgttttcagaatttgtcaaagaccggatgaaggatctgatgaagacacttcgccaccaaaagtatccgtataatctcctaatcaacgatttgcgtgaaacaaagagctctctgaccaagctgttcacggtttctcttgaatatcaagtgatgcagtggcagaaagaagaggatcttgcctttttgactgagccgattttcagcggcagcggattaaatgatgtctcaattcatgtaaaggatcgatgggatactgggaaactcaccatagattttgattaccgcactgatttattttcacgtgaagaaatcaacatgatttgtgagcgcatgattaccatgctggagaacgcgttaacgcatccagaacatacaattgatgaattaacactgatttctgatgcggagaaagaaaaagtcatttctaaatggaatgagacggcaaaatccgagaagctggtcagccttcaggacatgttcgaaaagcaggcagttcttacgccagaacgtatcgctctcatgtgtgatgacattcaagtcaactatcgaaagctcaatgaagaggcaaaccgcctcgcgcgtctgttgatcgaaaaagggattggtccggagcaatttgtcgctttggcgctgccgcgttcccctgagatggtggcttcaatgcttggtgtgctcaagactggtgcggcgtatctcccccttgatccggagtttccagccgaccgcatttcttacatgctggaggatgcgaaaccttcatgcatcataacgactgaggaaatagcagccagtctgcctgatgacctggctgtacctgagcttgtgcttgatcaggctgttacacaggagattataaaacgctattcgccggaaaatcaggatgtatcggtttcgcttgaccatcctgcgtatatcatctatacctcaggatcaacaggaagaccgaagggagtcgttgtgacacagaaaagcttaagcaattttctgctgtctatgcaggaggcattttctctaggagaagaagacaggctgttggctgtgacgactgtcgcttttgatatttcagcattggagttatatcttccgctgattagcggagcgcaaatcgtgatcgcaaagaaagaaacgatccgtgagccgcaggcattagctcaaatgattgaaaatttcgatattaacattatgcaggcgacaccgacactgtggcacgctttggtaacgagtgaacctgagaaacttcgggggcttagagtgcttgtaggaggcgaggcgctgccgagcggtcttttgcaggaacttcaagaccttcattgttcagtcacgaacttatacggtcccactgaaacaacgatttggtctgccgcagcttttcttgaagaagggctgaagggcgttcctccgattgggaaaccgatttggaacacgcaggtgtatgtgcttgataatggattgcagccggtgccgccgggcgttgtcggagagctttatattgcaggaaccggcttggccagaggttatttccatcgtcctgatttaacggcggagcgcttcgttgcagatccatacggaccgccgggaactcggatgtatcggaccggagaccaggcccgctggcgcgccgatgggtctttggattatatcgggcgggcggatcatcaaatcaaaattcgcggattccgaattgaacttggagaaattgatgccgtgcttgccaatcacccgcacattgaacaggccgcggttgtcgtacgggaagatcagccgggagacaaacgattggcggcttatgtagtcgctgatgctgctattgatactgcagagcttcgtcgttatatgggggctagtcttcctgattatatggtaccgtcggcgtttgtggagatggacgagctgccgttaacacctaatggcaagcttgaccggaaagcactgccggcaccagacttcagcacatctgtcagtgatcgggccccgcggactcctcaggaagagatattggcacaaatatggtctgaggttctcggcagaaagcaaattggcattcatgacgatttctttgcgctcggagggcattccttgaaggccatgaccgccgcgtcccgcatcaagaaagagctcgggattgatcttccagtgaagcttttgtttgaagcgccgacgatcgccggcatttcagcgtatttgaaaaacgggggctctgatggcttgcaggatgtaacgataatgaatcaggatcaggagcagatcattttcgcatttccgccggttctgggctatggccttatgtaccaaaatctgtccagccgcttgccgtcatacaagctatgcgcctttgattttattgaggaggaagaccggcttgaccgctatgcggatttgatccagaagctgcagccggaagggcctttaacattgtttggatattcagcgggatgcagcctggcgtttgaagctgcgaaaaagcttgaggaacaaggccgtattgttcagcggatcatcatggtggattcctataaaaaacaaggtgtcagtgatctggacggacgcacggttgaaagtgatgtcgaagcgttgatgaatgtcaatcgggacaatgaagcgctcaacagcgaagccgtcaaacacggcctcaagcaaaaaacacatgccttttactcatactacgtcaacctgatcagcacaggccaggtgaaagcagatattgatctgttgacttccggcgctgattttgacatgccggaatggcttgcatcatgggaagaagctacaacaggtgtttaccgtgtgaaaagaggcttcggaacacacgcagaaatgctgcagggcgaaacgctagataggaatgcggagattttgctcgaatttcttaatacacaaaccgtaacggtttcataaatgaagtgatgaaaggaggagacagccaatgagccaactcttcaaatcatttgatgcgtcggaaaaaacacagctcatctgttttccgtttgccggcggctattcggcgtcgtttcgccctctccatgcttttttgcagggggagtgcgagatgctcgctgccgagccgccgggacacggcacgaatcaaacgtcagccattgaggatctcgaagagctgacggatttgtacaagcaagaactgaaccttcgccctgatcggccgtttgtgctgttcggacacagtatgggcggaatgatcaccttcaggctggcgcaaaagcttgagcgtgaaggcatctttccgcaggcggttatcatttctgcaatccagccgcctcatattcagcggaagaaagtgtcccacctgcctgatgatcagtttctcgatcatattatccaattaggcggaatgcccgcagagcttgttgaaaataaggaggtcatgtcctttttcctgccttctttccgatcagattaccgggctcttgaacaatttgagctttacgatctggcccagatccagtcgcctgttcatgtctttaacgggcttgatgataaaaaatgcatacgagatgcggaagggtggaagaagtgggcaaaagacatcacattccatcaatttgacggcgggcacatgttcctgctgtcacaaacggaagaagtcgcagaacggatttttgcgatcttgaatcagcatccgatcattcaaccgtgaagccgccccgcagggcgctccgcaggccgcttccggaccactccggaagcggccgtgcggtcggaggatcc

SEQ ID NO: 22 - DNA, 5259 bp, Artificial Sequence
  Description of Artificial Sequence: Synthetic polynucleotide
gaattcgcatgcatcgacaaaaatgtcatgaaagaatcgttgtaagacgctcttcgcaagggtgtctttttttgcctttttttcggtttttgcgcggtacacatagtcatgtaaagattgtaaattgcattcagcaataaaaaaagattgaacgcagcagtttggtttaaaaatttttatttttctgtaaataatgtttagtggaaatgattgcggcatcccgcaaaaaatattgctgtaaataaactggaatctttcggcatcccgcatgaaacttttcacccatttttcggtgataaaaacatttttttcatttaaactgaacggtagaaagataaaaaatattgaaaacaatgaataaatagccaaaattggtttcttattagggtggggtcttgcggtctttatccgcttatgttaaacgccgcaatgctgactgacggcagcctgctttaatagcggccatctgttttttgattggaagcactgctttttaagtgtagtactttgggctatttcggctgttagttcataagaattaaaagctgatatggataagaaagagaaaatgcgttgcacatgttcactgcttataaagattaggggaggtatgacaatatggaaataactttttaccctttaacggatgcacaaaaacgaatttggtacacagaaaaattttatcctcacacgagcatttcaaatcttgcggggattggtaagctggtttcagctgatgcgattgattatgtgcttgttgagcaggcgattcaagagtttattcgcagaaatgacgccatgcgccttcggttgcggctagatgaaaacggggagcctgttcaatatattagcgagtatcggcctgttgatataaaacatactgacactactgaagatccgaatgcgatagagtttatttcacaatggagccgggaggaaacgaagaaacctttgccgctatacgattgtgatttgttccgtttttccttgttcaccataaaggaaaatgaagtgtggttttacgcaaatgttcatcacgtgatttctgatggtatctccatgaatattctcgggaatgcgatcatgcacatttatttagaattagccagcggctcagagacaaaagaaggaatctcgcattcatttatcgatcatgttttatctgaacaggaatatgctcaatcgaagcggtttgaaaaggacaaggcgttttggaacaaacaatttgaatcggtgcctgaacttgtttccttgaaacggaatgcatccgcagggggaagtttagatgctgagaggttctctaaagatgtgcctgaagcgcttcatcagcagattctgtcgttttgtgaggcgaataaagtcagtgttctttcggtatttcaatcgctgctcgccgcctatttgtacagggtcagcggccagaatgatgttgtgacgggaacatttatgggcaaccggacaaatgcgaaagagaagcagatgcttggcatgtttgtttctacggttccgcttcggacaaacattgacggcgggcaggcgttttcagaatttgtcaaagaccggatgaaggatctgatgaagacacttcgccaccaaaagtatccgtataatctcctaatcaacgatttgcgtgaaacaaagagctctctgaccaagctgttcacggtttctcttgaatatcaagtgatgcagtggcagaaagaagaggatcttgcctttttgactgagccgattttcagcggcagcggattaaatgatgtctcaattcatgtaaaggatcgatgggatactgggaaactcaccatagattttgattaccgcactgatttattttcacgtgaagaaatcaacatgatttgtgagcgcatgattaccatgctggagaacgcgttaacgcatccagaacatacaattgatgaattaacactgctgttgccagaggagaaagaaaaagtcatttctaaatggaatgagacggcaaaatccgagaagctggtcagccttcaggacatgttcgaaaagcaggcagttcttacgccagaacgtatcgctctcatgtgtgatgacattcaagtcaactatcgaaagctcaatgaagaggcaaaccgcctcgcgcgtctgttgatcgaaaaagggattggtccggagcaatttgtcgctttggcgctgccgcgttcccctgagatggtggcttcaatgcttggtgtgctcaagactggtgcggcgtatctcccccttgatccggagtttccagccgaccgcatttcttacatgctggaggatgcgaaaccttcatgcatcataacgactgaggaaatagcagccagtctgcctgatgacctggctgtacctgagcttgtgcttgatcaggctgttacacaggagattataaaacgctattcgccggaaaatcaggatgtatcggtttcgcttgaccatcctgcgtatatcatctatacctcaggatcaacaggaagaccgaagggagtcgttgtgacacagaaaagcttaagcaattttctgctgtctatgcaggaggcattttctctaggagaagaagacaggctgttggctgtgacgactgtcgcttttgatatttcagcattggagttatatcttccgctgattagcggagcgcaaatcgtgatcgcaaagaaagaaacgatccgtgagccgcaggcattagctcaaatgattgaaaatttcgatattaacattatgcaggcgacaccgacactgtggcacgctttggtaacgagtgaacctgagaaacttcgggggcttagagtgcttgtaggaggcgaggcgctgccgagcggtcttttgcaggaacttcaagaccttcattgttcagtcacgaacttatacggtcccactgaaacaacgatttggtctgccgcagcttttcttgaagaagggctgaagggcgttcctccgattgggaaaccgatttggaacacgcaggtgtatgtgcttgataatggattgcagccggtgccgccgggcgttgtcggagagctttatattgcaggaaccggcttggccagaggttatttccatcgtcctgatttaacggcggagcgcttcgttgcagatccatacggaccgccgggaactcggatgtatcggaccggagaccaggcccgctggcgcgccgatgggtctttggattatatcgggcgggcggatcatcaaatcaaaattcgcggattccgaattgaacttggagaaattgatgccgtgcttgccaatcacccgcacattgaacaggccgcggttgtcgtacgggaagatcagccgggagacaaacgattggcggcttatgtagtcgctgatgctgctattgatactgcagagcttcgtcgttatatgggggctagtcttcctgattatatggtaccgtcggcgtttgtggagatggacgagctgccgttaacacctaatggcaagcttgaccggaaagcactgccggcaccagacttcagcacatctgtcagtgatcgggccccgcggactcctcaggaagagatattgtgtgacttgtttgcagaggttctcggtttggcacgcgtcggtattcatgacgatttctttgcgctcggagggcattccttgaaggccatgaccgccgcgtcccgcatcaagaaagagctcgggattgatcttccagtgaagcttttgtttgaagcgccgacgatcgccggcatttcagcgtatttgaaaaacgggggctctgatggcttgcaggatgtaacgataatgaatcaggatcaggagcagatcattttcgcatttccgccggttctgggctatggccttatgtaccaaaatctgtccagccgcttgccgtcatacaagctatgcgcctttgattttattgaggaggaagaccggcttgaccgctatgcggatttgatccagaagctgcagccggaagggcctttaacattgtttggatattcagcgggatgcagcctggcgtttgaagctgcgaaaaagcttgaggaacaaggccgtattgttcagcggatcatcatggtggattcctataaaaaacaaggtgtcagtgatctggacggacgcacggttgaaagtgatgtcgaagcgttgatgaatgtcaatcgggacaatgaagcgctcaacagcgaagccgtcaaacacggcctcaagcaaaaaacacatgccttttactcatactacgtcaacctgatcagcacaggccaggtgaaagcagatattgatctgttgacttccggcgctgattttgacatgccggaatggcttgcatcatgggaagaagctacaacaggtgtttaccgtgtgaaaagaggcttcggaacacacgcagaaatgctgcagggcgaaacgctagataggaatgcggagattttgctcgaatttcttaatacacaaaccgtaacggtttcataaatgaagtgatgaaaggaggagacagccaatgagccaactcttcaaatcatttgatgcgtcggaaaaaacacagctcatctgttttccgtttgccggcggctattcggcgtcgtttcgccctctccatgcttttttgcagggggagtgcgagatgctcgctgccgagccgccgggacacggcacgaatcaaacgtcagccattgaggatctcgaagagctgacggatttgtacaagcaagaactgaaccttcgccctgatcggccgtttgtgctgttcggacacagtatgggcggaatgatcaccttcaggctggcgcaaaagcttgagcgtgaaggcatctttccgcaggcggttatcatttctgcaatccagccgcctcatattcagcggaagaaagtgtcccacctgcctgatgatcagtttctcgatcatattatccaattaggcggaatgcccgcagagcttgttgaaaataaggaggtcatgtcctttttcctgccttctttccgatcagattaccgggctcttgaacaatttgagctttacgatctggcccagatccagtcgcctgttcatgtctttaacgggcttgatgataaaaaatgcatacgagatgcggaagggtggaagaagtgggcaaaagacatcacattccatcaatttgacggcgggcacatgttcctgctgtcacaaacggaagaagtcgcagaacggatttttgcgatcttgaatcagcatccgatcattcaaccgtgaagccgccccgcagggcgctccgcaggccgcttccggaccactccggaagcggccgtgcggtcggaggatcc

SEQ ID NO: 23 - DNA, 5259 bp, Artificial Sequence
  Description of Artificial Sequence: Synthetic polynucleotide
gaattcgcatgcatcgacaaaaatgtcatgaaagaatcgttgtaagacgctcttcgcaagggtgtctttttttgcctttttttcggtttttgcgcggtacacatagtcatgtaaagattgtaaattgcattcagcaataaaaaaagattgaacgcagcagtttggtttaaaaatttttatttttctgtaaataatgtttagtggaaatgattgcggcatcccgcaaaaaatattgctgtaaataaactggaatctttcggcatcccgcatgaaacttttcacccatttttcggtgataaaaacatttttttcatttaaactgaacggtagaaagataaaaaatattgaaaacaatgaataaatagccaaaattggtttcttattagggtggggtcttgcggtctttatccgcttatgttaaacgccgcaatgctgactgacggcagcctgctttaatagcggccatctgttttttgattggaagcactgctttttaagtgtagtactttgggctatttcggctgttagttcataagaattaaaagctgatatggataagaaagagaaaatgcgttgcacatgttcactgcttataaagattaggggaggtatgacaatatggaaataactttttaccctttaacggatgcacaaaaacgaatttggtacacagaaaaattttatcctcacacgagcatttcaaatcttgcggggattggtaagctggtttcagctgatgcgattgattatgtgcttgttgagcaggcgattcaagagtttattcgcagaaatgacgccatgcgccttcggttgcggctagatgaaaacggggagcctgttcaatatattagcgagtatcggcctgttgatataaaacatactgacactactgaagatccgaatgcgatagagtttatttcacaatggagccgggaggaaacgaagaaacctttgccgctatacgattgtgatttgttccgtttttccttgttcaccataaaggaaaatgaagtgtggttttacgcaaatgttcatcacgtgatttctgatggtatctccatgaatattctcgggaatgcgatcatgcacatttatttagaattagccagcggctcagagacaaaagaaggaatctcgcattcatttatcgatcatgttttatctgaacaggaatatgctcaatcgaagcggtttgaaaaggacaaggcgttttggaacaaacaatttgaatcggtgcctgaacttgtttccttgaaacggaatgcatccgcagggggaagtttagatgctgagaggttctctaaagatgtgcctgaagcgcttcatcagcagattctgtcgttttgtgaggcgaataaagtcagtgttctttcggtatttcaatcgctgctcgccgcctatttgtacagggtcagcggccagaatgatgttgtgacgggaacatttatgggcaaccggacaaatgcgaaagagaagcagatgcttggcatgtttgtttctacggttccgcttcggacaaacattgacggcgggcaggcgttttcagaatttgtcaaagaccggatgaaggatctgatgaagacacttcgccaccaaaagtatccgtataatctcctaatcaacgatttgcgtgaaacaaagagctctctgaccaagctgttcacggtttctcttgaatatcaagtgatgcagtggcagaaagaagaggatcttgcctttttgactgagccgattttcagcggcagcggattaaatgatgtctcaattcatgtaaaggatcgatgggatactgggaaactcaccatagattttgattaccgcactgatttattttcacgtgaagaaatcaacatgatttgtgagcgcatgattaccatgctggagaacgcgttaacgcatccagaacatacaattgatgaattaacactgatttctgatgcggagaaagaaaaagtcatttctaaatggaatgagacggcaaaatccgagaagctggtcagccttcaggacatgttcgaaaagcaggcagttcttacgccagaacgtatcgctctcatgtgtgatgacattcaagtcaactatcgaaagctcaatgaagaggcaaaccgcctcgcgcgtctgttgatcgaaaaagggattggtccggagcaatttgtcgctttggcgctgccgcgttcccctgagatggtggcttcaatgcttggtgtgctcaagactggtgcggcgtatctcccccttgatccggagtttccagccgaccgcatttcttacatgctggaggatgcgaaaccttcatgcatcataacgactgaggaaatagcagccagtctgcctgatgacctggctgtacctgagcttgtgcttgatcaggctgttacacaggagattataaaacgctattcgccggaaaatcaggatgtatcggtttcgcttgaccatcctgcgtatatcatctatacctcaggatcaacaggaagaccgaagggagtcgttgtgacacagaaaagcttaagcaattttctgctgtctatgcaggaggcattttctctaggagaagaagacaggctgttggctgtgacgactgtcgcttttgatatttcagcattggagttatatcttccgctgattagcggagcgcaaatcgtgatcgcaaagaaagaaacgatccgtgagccgcaggcattagctcaaatgattgaaaatttcgatattaacattatgcaggcgacaccgacactgtggcacgctttggtaacgagtgaacctgagaaacttcgggggcttagagtgcttgtaggaggcgaggcgctgccgagcggtcttttgcaggaacttcaagaccttcattgttcagtcacgaacttatacggtcccactgaaacaacgatttggtctgccgcagcttttcttgaagaagggctgaagggcgttcctccgattgggaaaccgatttggaacacgcaggtgtatgtgcttgataatggattgcagccggtgccgccgggcgttgtcggagagctttatattgcaggaaccggcttggccagaggttatttccatcgtcctgatttaacggcggagcgcttcgttgcagatccatacggaccgccgggaactcggatgtatcggaccggagaccaggcccgctggcgcgccgatgggtctttggattatatcgggcgggcggatcatcaaatcaaaattcgcggattccgaattgaacttggagaaattgatgccgtgcttgccaatcacccgcacattgaacaggccgcggttgtcgtacgggaagatcagccgggagacaaacgattggcggcttatgtagtcgctgatgctgctattgatactgcagagcttcgtcgttatatgggggctagtcttcctgattatatggtaccgtcggcgtttgtggagatggacgagctgccgttaacacctaatggcaagcttgaccggaaagcactgccggcaccagacttcagcacatctgtcagtgatcgggccccgcggactcctcaggaagagatattgtgtgacttgtttgcagaggttctcggtttggcacgcgtcggtattcatgacgatttctttgcgctcggagggcattccttgaaggccatgaccgccgcgtcccgcatcaagaaagagctcgggattgatcttccagtgaagcttttgtttgaagcgccgacgatcgccggcatttcagcgtatttgaaaaacgggggctctgatggcttgcaggatgtaacgataatgaatcaggatcaggagcagatcattttcgcatttccgccggttctgggctatggccttatgtaccaaaatctgtccagccgcttgccgtcatacaagctatgcgcctttgattttattgaggaggaagaccggcttgaccgctatgcggatttgatccagaagctgcagccggaagggcctttaacattgtttggatattcagcgggatgcagcctggcgtttgaagctgcgaaaaagcttgaggaacaaggccgtattgttcagcggatcatcatggtggattcctataaaaaacaaggtgtcagtgatctggacggacgcacggttgaaagtgatgtcgaagcgttgatgaatgtcaatcgggacaatgaagcgctcaacagcgaagccgtcaaacacggcctcaagcaaaaaacacatgccttttactcatactacgtcaacctgatcagcacaggccaggtgaaagcagatattgatctgttgacttccggcgctgattttgacatgccggaatggcttgcatcatgggaagaagctacaacaggtgtttaccgtgtgaaaagaggcttcggaacacacgcagaaatgctgcagggcgaaacgctagataggaatgcggagattttgctcgaatttcttaatacacaaaccgtaacggtttcataaatgaagtgatgaaaggaggagacagccaatgagccaactcttcaaatcatttgatgcgtcggaaaaaacacagctcatctgttttccgtttgccggcggctattcggcgtcgtttcgccctctccatgcttttttgcagggggagtgcgagatgctcgctgccgagccgccgggacacggcacgaatcaaacgtcagccattgaggatctcgaagagctgacggatttgtacaagcaagaactgaaccttcgccctgatcggccgtttgtgctgttcggacacagtatgggcggaatgatcaccttcaggctggcgcaaaagcttgagcgtgaaggcatctttccgcaggcggttatcatttctgcaatccagccgcctcatattcagcggaagaaagtgtcccacctgcctgatgatcagtttctcgatcatattatccaattaggcggaatgcccgcagagcttgttgaaaataaggaggtcatgtcctttttcctgccttctttccgatcagattaccgggctcttgaacaatttgagctttacgatctggcccagatccagtcgcctgttcatgtctttaacgggcttgatgataaaaaatgcatacgagatgcggaagggtggaagaagtgggcaaaagacatcacattccatcaatttgacggcgggcacatgttcctgctgtcacaaacggaagaagtcgcagaacggatttttgcgatcttgaatcagcatccgatcattcaaccgtgaagccgccccgcagggcgctccgcaggccgcttccggaccactccggaagcggccgtgcggtcggaggatcc

SEQ ID NO: 24 - DNA, 5259 bp, Artificial Sequence; identical to SEQ ID NO: 21
  Description of Artificial Sequence: Synthetic polynucleotide

SEQ ID NO: 25 - DNA, 5259 bp, Artificial Sequence; identical to SEQ ID NO: 22
  Description of Artificial Sequence: Synthetic polynucleotide

SEQ ID NO: 26 - DNA, 5259 bp, Artificial Sequence; identical to SEQ ID NO: 23
  Description of Artificial Sequence: Synthetic polynucleotide

SEQ ID NO: 27 - DNA, 5250 bp, Artificial Sequence
  Description of Artificial Sequence: Synthetic polynucleotide
gaattcgcatgcatcgacaaaaatgtcatgaaagaatcgttgtaagacgctcttcgcaagggtgtctttttttgcctttttttcggtttttgcgcggtacacatagtcatgtaaagattgtaaattgcattcagcaataaaaaaagattgaacgcagcagtttggtttaaaaatttttatttttctgtaaataatgtttagtggaaatgattgcggcatcccgcaaaaaatattgctgtaaataaactggaatctttcggcatcccgcatgaaacttttcacccatttttcggtgataaaaacatttttttcatttaaactgaacggtagaaagataaaaaatattgaaaacaatgaataaatagccaaaattggtttcttattagggtggggtcttgcggtctttatccgcttatgttaaacgccgcaatgctgactgacggcagcctgctttaatagcggccatctgttttttgattggaagcactgctttttaagtgtagtactttgggctatttcggctgttagttcataagaattaaaagctgatatggataagaaagagaaaatgcgttgcacatgttcactgcttataaagattaggggaggtatgacaatatggaaataactttttaccctttaacggatgcacaaaaacgaatttggtacacagaaaaattttatcctcacacgagcatttcaaatcttgcggggattggtaagctggtttcagctgatgcgattgattatgtgcttgttgagcaggcgattcaagagtttattcgcagaaatgacgccatgcgccttcggttgcggctagatgaaaacggggagcctgttcaatatattagcgagtatcggcctgttgatataaaacatactgacactactgaagatccgaatgcgatagagtttatttcacaatggagccgggaggaaacgaagaaacctttgccgctatacgattgtgatttgttccgtttttccttgttcaccataaaggaaaatgaagtgtggttttacgcaaatgttcatcacgtgatttctgatggtatctccatgaatattctcgggaatgcgatcatgcacatttatttagaattagccagcggctcagagacaaaagaaggaatctcgcattcatttatcgatcatgttttatctgaacaggaatatgctcaatcgaagcggtttgaaaaggacaaggcgttttggaacaaacaatttgaatcggtgcctgaacttgtttccttgaaacggaatgcatccgcagggggaagtttagatgctgagaggttctctaaagatgtgcctgaagcgcttcatcagcagattctgtcgttttgtgaggcgaataaagtcagtgttctttcggtatttcaatcgctgctcgccgcctatttgtacagggtcagcggccagaatgatgttgtgacgggaacatttatgggcaaccggacaaatgcgaaagagaagcagatgcttggcatgtttgtttctacggttccgcttcggacaaacattgacggcgggcaggcgttttcagaatttgtcaaagaccggatgaaggatctgatgaagacacttcgccaccaaaagtatccgtataatctcctaatcaacgatttgcgtgaaacaaagagctctctgaccaagctgttcacggtttctcttgaatatcaagtgatgcagtggcagaaagaagaggatcttgcctttttgactgagccgattttcagcggcagcggattaaatgatgtctcaattcatgtaaaggatcgatgggatactgggaaactcaccatagattttgattaccgcactgatttattttcacgtgaagaaatcaacatgatttgtgagcgcatgattaccatgctggagaacgcgttaacgcatccagaacatacaattgatgaattaacactgatttctgatgcggagaagcagatgattctcaaaacatggaacgccacaggaaaaacgtatccatatataacttttcatgagttgtttgagcagcaggcgaaaaagacgcctgatagagcggctgtcagctatgaaggtcaaacattgacgtatcgggagcttgatgagaaaagcacacagctggccatttatttgcaggcgcatggagtgggtcctgaccgtctggcggggatctatgtggatcgatcgctggacatgctagtgggtttattagcgatcctcaaggctgggggagcgtatgtgccgctagacccgtcctatccggctgaacgattagaatacatgcttgaggacagtgaagttttcattacactgacgacatcggaattagtaaatacgttgagttggaacggtgtcacaacagcccttttagatcaagattgggatgaaattgctcaaacagcctctgatcgaaaagtgcttacacgcactgtcacgccagagaacttggcatatgtcatttatacatccggcagcacaggaaagccaaaaggtgtcatgataccacataaagctttgacaaactttctcgtttcgatgggggaaacaccaggtcttacggcagaggataaaatgcttgctgtcacaacctactgttttgatattgcagctctggaattatttttgcctttaataaagggcgcacactgctatatttgtcaaacggagcatacaaaagacgttgaaaaactgaaacgggacatccgcgcgatcaaaccgacagtgatgcaggcaacccccgctacgtggaagatgctcttttattcaggctgggaaaatgaagagagcgtgaaaattttatgcggtggcgaagcattgcctgagacattaaaacgatatttcttagatacgggcagcgaagcctggaatatgttcgggccaaccgaaacaactatctggtcagcggttcagcgcattaacgttgaatgctctcatgccacgataggaaggccaatcgccaatacacaaatctatattacggattctcagctcgcgccagtgccggcaggtgttccgggtgagctgtgcattgcaggagacggtgtggcgaagggctactacaaaaaggaagaattaacggattcgagattcattgacaacccttttgagcctgggtctaagctttatagaacgggagacatggcccgttggcttacgggagggcgaattgaatatataggccgcatcgataatcaagtaaaaatccgcggattccgtattgaacttggtgatattgaaagcaggcttagtgagcatcccggcattctggaatgcgttgtggtcgcagatatggataacctagctgcctattatacagctaaacatgcaaatgcttctctcacagcgagagagctgcgtcattttgtgaaaaacgctttgcctgcctatatggtgccttcttattttattcagcttgatcatatgccgttaactccgaacggaaagatagatagaaacagccttaagaatatcgatttatcaggggagcagctaaagcaaaggcagacctctcctaagaacattcaggatactgtttttaccatttggcaggaagtgctgggcagaaagcaaattggcattcatgacgatttctttgcgctcggagggcattccttgaaggccatgaccgccgcgtcccgcatcaagaaagagctcgggattgatcttccagtgaagcttttgtttgaagcgccgacgatcgccggcatttcagcgtatttgaaaaacgggggctctgatggcttgcaggatgtaacgataatgaatcaggatcaggagcagatcattttcgcatttccgccggttctgggctatggccttatgtaccaaaatctgtccagccgcttgccgtcatacaagctatgcgcctttgattttattgaggaggaagaccggcttgaccgctatgcggatttgatccagaagctgcagccggaagggcctttaacattgtttggatattcagcgggatgcagcctggcgtttgaagctgcgaaaaagcttgaggaacaaggccgtattgttcagcggatcatcatggtggattcctataaaaaacaaggtgtcagtgatctggacggacgcacggttgaaagtgatgtcgaagcgttgatgaatgtcaatcgggacaatgaagcgctcaacagcgaagccgtcaaacacggcctcaagcaaaaaacacatgccttttactcatactacgtcaacctgatcagcacaggccaggtgaaagcagatattgatctgttgacttccggcgctgattttgacatgccggaatggcttgcatcatgggaagaagctacaacaggtgtttaccgtgtgaaaagaggcttcggaacacacgcagaaatgctgcagggcgaaacgctagataggaatgcggagattttgctcgaatttcttaatacacaaaccgtaacggtttcataaatgaagtgatgaaaggaggagacagccaatgagccaactcttcaaatcatttgatgcgtcggaaaaaacacagctcatctgttttccgtttgccggcggctattcggcgtcgtttcgccctctccatgcttttttgcagggggagtgcgagatgctcgctgccgagccgccgggacacggcacgaatcaaacgtcagccattgaggatctcgaagagctgacggatttgtacaagcaagaactgaaccttcgccctgatcggccgtttgtgctgttcggacacagtatgggcggaatgatcaccttcaggctggcgcaaaagcttgagcgtgaaggcatctttccgcaggcggttatcatttctgcaatccagccgcctcatattcagcggaagaaagtgtcccacctgcctgatgatcagtttctcgatcatattatccaattaggcggaatgcccgcagagcttgttgaaaataaggaggtcatgtcctttttcctgccttctttccgatcagattaccgggctcttgaacaatttgagctttacgatctggcccagatccagtcgcctgttcatgtctttaacgggcttgatgataaaaaatgcatacgagatgcggaagggtggaagaagtgggcaaaagacatcacattccatcaatttgacggcgggcacatgttcctgctgtcacaaacggaagaagtcgcagaacggatttttgcgatcttgaatcagcatccgatcattcaaccgtgaagccgccccgcagggcgctccgcaggccgcttccggaccactccggaagcggccgtgcggtcggaggatcc

SEQ ID NO: 28 - DNA, 5250 bp, Artificial Sequence
  Description of Artificial Sequence: Synthetic polynucleotide
gaattcgcatgcatcgacaaaaatgtcatgaaagaatcgttgtaagacgctcttcgcaagggtgtctttttttgcctttttttcggtttttgcgcggtacacatagtcatgtaaagattgtaaattgcattcagcaataaaaaaagattgaacgcagcagtttggtttaaaaatttttatttttctgtaaataatgtttagtggaaatgattgcggcatcccgcaaaaaatattgctgtaaataaactggaatctttcggcatcccgcatgaaacttttcacccatttttcggtgataaaaacatttttttcatttaaactgaacggtagaaagataaaaaatattgaaaacaatgaataaatagccaaaattggtttcttattagggtggggtcttgcggtctttatccgcttatgttaaacgccgcaatgctgactgacggcagcctgctttaatagcggccatctgttttttgattggaagcactgctttttaagtgtagtactttgggctatttcggctgttagttcataagaattaaaagctgatatggataagaaagagaaaatgcgttgcacatgttcactgcttataaagattaggggaggtatgacaatatggaaataactttttaccctttaacggatgcacaaaaacgaatttggtacacagaaaaattttatcctcacacgagcatttcaaatcttgcggggattggtaagctggtttcagctgatgcgattgattatgtgcttgttgagcaggcgattcaagagtttattcgcagaaatgacgccatgcgccttcggttgcggctagatgaaaacggggagcctgttcaatatattagcgagtatcggcctgttgatataaaacatactgacactactgaagatccgaatgcgatagagtttatttcacaatggagccgggaggaaacgaagaaacctttgccgctatacgattgtgatttgttccgtttttccttgttcaccataaaggaaaatgaagtgtggttttacgcaaatgttcatcacgtgatttctgatggtatctccatgaatattctcgggaatgcgatcatgcacatttatttagaattagccagcggctcagagacaaaagaaggaatctcgcattcatttatcgatcatgttttatctgaacaggaatatgctcaatcgaagcggtttgaaaaggacaaggcgttttggaacaaacaatttgaatcggtgcctgaacttgtttccttgaaacggaatgcatccgcagggggaagtttagatgctgagaggttctctaaagatgtgcctgaagcgcttcatcagcagattctgtcgttttgtgaggcgaataaagtcagtgttctttcggtatttcaatcgctgctcgccgcctatttgtacagggtcagcggccagaatgatgttgtgacgggaacatttatgggcaaccggacaaatgcgaaagagaagcagatgcttggcatgtttgtttctacggttccgcttcggacaaacattgacggcgggcaggcgttttcagaatttgtcaaagaccggatgaaggatctgatgaagacacttcgccaccaaaagtatccgtataatctcctaatcaacgatttgcgtgaaacaaagagctctctgaccaagctgttcacggtttctcttgaatatcaagtgatgcagtggcagaaagaagaggatcttgcctttttgactgagccgattttcagcggcagcggattaaatgatgtctcaattcatgtaaaggatcgatgggatactgggaaactcaccatagattttgattaccgcactgatttattttcacgtgaagaaatcaacatgatttgtgagcgcatgattaccatgctggagaacgcgttaacgcatccagaacatacaattgatgaattaacactgatttctgatgcggagaagcagatgattctcaaaacatggaacgccacaggaaaaacgtatccatatataacttttcatgagttgtttgagcagcaggcgaaaaagacgcctgatagagcggctgtcagctatgaaggtcaaacattgacgtatcgggagcttgatgagaaaagcacacagctggccatttatttgcaggcgcatggagtgggtcctgaccgtctggcggggatctatgtggatcgatcgctggacatgctagtgggtttattagcgatcctcaaggctgggggagcgtatgtgccgctagacccgtcctatccggctgaacgattagaatacatgcttgaggacagtgaagttttcattacactgacgacatcggaattagtaaatacgttgagttggaacggtgtcacaacagcccttttagatcaagattgggatgaaattgctcaaacagcctctgatcgaaaagtgcttacacgcactgtcacgccagagaacttggcatatgtcatttatacatccggcagcacaggaaagccaaaaggtgtcatgataccacataaagctttgacaaactttctcgtttcgatgggggaaacaccaggtcttacggcagaggataaaatgcttgctgtcacaacctactgttttgatattgcagctctggaattatttttgcctttaataaagggcgcacactgctatatttgtcaaacggagcatacaaaagacgttgaaaaactgaaacgggacatccgcgcgatcaaaccgacagtgatgcaggcaacccccgctacgtggaagatgctcttttattcaggctgggaaaatgaagagagcgtgaaaattttatgcggtggcgaagcattgcctgagacattaaaacgatatttcttagatacgggcagcgaagcctggaatatgttcgggccaaccgaaacaactatctggtcagcggttcagcgcattaacgttgaatgctctcatgccacgataggaaggccaatcgccaatacacaaatctatattacggattctcagctcgcgccagtgccggcaggtgttccgggtgagctgtgcattgcaggagacggtgtggcgaagggctactacaaaaaggaagaattaacggattcgagattcattgacaacccttttgagcctgggtctaagctttatagaacgggagacatggcccgttggcttacgggagggcgaattgaatatataggccgcatcgataatcaagtaaaaatccgcggattccgtattgaacttggtgatattgaaagcaggcttagtgagcatcccggcattctggaatgcgttgtggtcgcagatatggataacctagctgcctattatacagctaaacatgcaaatgcttctctcacagcgagagagctgcgtcattttgtgaaaaacgctttgcctgcctatatggtgccttcttattttattcagcttgatcatatgccgttaactccgaacggaaagatagatagaaacagccttaagaatatcgatttatcaggggagcagctaaagcaaaggcagacctctcctaagaacattcaggatactgtttttaccatttggtctgaggttctcggcagaaagcaaattggcattcatgacgatttctttgcgctcggagggcattccttgaaggccatgaccgccgcgtcccgcatcaagaaagagctcgggattgatcttccagtgaagcttttgtttgaagcgccgacgatcgccggcatttcagcgtatttgaaaaacgggggctctgatggcttgcaggatgtaacgataatgaatcaggatcaggagcagatcattttcgcatttccgccggttctgggctatggccttatgtaccaaaatctgtccagccgcttgccgtcatacaagctatgcgcctttgattttattgaggaggaagaccggcttgaccgctatgcggatttgatccagaagctgcagccggaagggcctttaacattgtttggatattcagcgggatgcagcctggcgtttgaagctgcgaaaaagcttgaggaacaaggccgtattgttcagcggatcatcatggtggattcctataaaaaacaaggtgtcagtgatctggacggacgcacggttgaaagtgatgtcgaagcgttgatgaatgtcaatcgggacaatgaagcgctcaacagcgaagccgtcaaacacggcctcaagcaaaaaacacatgccttttactcatactacgtcaacctgatcagcacaggccaggtgaaagcagatattgatctgttgacttccggcgctgattttgacatgccggaatggcttgcatcatgggaagaagctacaacaggtgtttaccgtgtgaaaagaggcttcggaacacacgcagaaatgctgcagggcgaaacgctagataggaatgcggagattttgctcgaatttcttaatacacaaaccgtaacggtttcataaatgaagtgatgaaaggaggagacagccaatgagccaactcttcaaatcatttgatgcgtcggaaaaaacacagctcatctgttttccgtttgccggcggctattcggcgtcgtttcgccctctccatgcttttttgcagggggagtgcgagatgctcgctgccgagccgccgggacacggcacgaatcaaacgtcagccattgaggatctcgaagagctgacggatttgtacaagcaagaactgaaccttcgccctgatcggccgtttgtgctgttcggacacagtatgggcggaatgatcaccttcaggctggcgcaaaagcttgagcgtgaaggcatctttccgcaggcggttatcatttctgcaatccagccgcctcatattcagcggaagaaagtgtcccacctgcctgatgatcagtttctcgatcatattatccaattaggcggaatgcccgcagagcttgttgaaaataaggaggtcatgtcctttttcctgccttctttccgatcagattaccgggctcttgaacaatttgagctttacgatctggcccagatccagtcgcctgttcatgtctttaacgggcttgatgataaaaaatgcatacgagatgcggaagggtggaagaagtgggcaaaagacatcacattccatcaatttgacggcgggcacatgttcctgctgtcacaaacggaagaagtcgcagaacggatttttgcgatcttgaatcagcatccgatcattcaaccgtgaagccgccccgcagggcgctccgcaggccgcttccggaccactccggaagcggccgtgcggtcggaggatcc

SEQ ID NO: 29 - DNA, 5250 bp, Artificial Sequence
  Description of Artificial Sequence: Synthetic polynucleotide
gaattcgcatgcatcgacaaaaatgtcatgaaagaatcgttgtaagacgctcttcgcaagggtgtctttttttgcctttttttcggtttttgcgcggtacacatagtcatgtaaagattgtaaattgcattcagcaataaaaaaagattgaacgcagcagtttggtttaaaaatttttatttttctgtaaataatgtttagtggaaatgattgcggcatcccgcaaaaaatattgctgtaaataaactggaatctttcggcatcccgcatgaaacttttcacccatttttcggtgataaaaacatttttttcatttaaactgaacggtagaaagataaaaaatattgaaaacaatgaataaatagccaaaattggtttcttattagggtggggtcttgcggtctttatccgcttatgttaaacgccgcaatgctgactgacggcagcctgctttaatagcggccatctgttttttgattggaagcactgctttttaagtgtagtactttgggctatttcggctgttagttcataagaattaaaagctgatatggataagaaagagaaaatgcgttgcacatgttcactgcttataaagattaggggaggtatgacaatatggaaataactttttaccctttaacggatgcacaaaaacgaatttggtacacagaaaaattttatcctcacacgagcatttcaaatcttgcggggattggtaagctggtttcagctgatgcgattgattatgtgcttgttgagcaggcgattcaagagtttattcgcagaaatgacgccatgcgccttcggttgcggctagatgaaaacggggagcctgttcaatatattagcgagtatcggcctgttgatataaaacatactgacactactgaagatccgaatgcgatagagtttatttcacaatggagccgggaggaaacgaagaaacctttgccgctatacgattgtgatttgttccgtttttccttgttcaccataaaggaaaatgaagtgtggttttacgcaaatgttcatcacgtgatttctgatggtatctccatgaatattctcgggaatgcgatcatgcacatttatttagaattagccagcggctcagagacaaaagaaggaatctcgcattcatttatcgatcatgttttatctgaacaggaatatgctcaatcgaagcggtttgaaaaggacaaggcgttttggaacaaacaatttgaatcggtgcctgaacttgtttccttgaaacggaatgcatccgcagggggaagtttagatgctgagaggttctctaaagatgtgcctgaagcgcttcatcagcagattctgtcgttttgtgaggcgaataaagtcagtgttctttcggtatttcaatcgctgctcgccgcctatttgtacagggtcagcggccagaatgatgttgtgacgggaacatttatgggcaaccggacaaatgcgaaagagaagcagatgcttggcatgtttgtttctacggttccgcttcggacaaacattgacggcgggcaggcgttttcagaatttgtcaaagaccggatgaaggatctgatgaagacacttcgccaccaaaagtatccgtataatctcctaatcaacgatttgcgtgaaacaaagagctctctgaccaagctgttcacggtttctcttgaatatcaagtgatgcagtggcagaaagaagaggatcttgcctttttgactgagccgattttcagcggcagcggattaaatgatgtctcaattcatgtaaaggatcgatgggatactgggaaactcaccatagattttgattaccgcactgatttattttcacgtgaagaaatcaacatgatttgtgagcgcatgattaccatgctggagaacgcgttaacgcatccagaacatacaattgatgaattaacactgatttctgatgcggagaagcagatgattctcaaaacatggaacgccacaggaaaaacgtatccatatataacttttcatgagttgtttgagcagcaggcgaaaaagacgcctgatagagcggctgtcagctatgaaggtcaaacattgacgtatcgggagcttgatgagaaaagcacacagctggccatttatttgcaggcgcatggagtgggtcctgaccgtctggcggggatctatgtggatcgatcgctggacatgctagtgggtttattagcgatcctcaaggctgggggagcgtatgtgccgctagacccgtcctatccggctgaacgattagaatacatgcttgaggacagtgaagttttcattacactgacgacatcggaattagtaaatacgttgagttggaacggtgtcacaacagcccttttagatcaagattgggatgaaattgctcaaacagcctctgatcgaaaagtgcttacacgcactgtcacgccagagaacttggcatatgtcatttatacatccggcagcacaggaaagccaaaaggtgtcatgataccacataaagctttgacaaactttctcgtttcgatgggggaaacaccaggtcttacggcagaggataaaatgcttgctgtcacaacctactgttttgatattgcagctctggaattatttttgcctttaataaagggcgcacactgctatatttgtcaaacggagcatacaaaagacgttgaaaaactgaaacgggacatccgcgcgatcaaaccgacagtgatgcaggcaacccccgctacgtggaagatgctcttttattcaggctgggaaaatgaagagagcgtgaaaattttatgcggtggcgaagcattgcctgagacattaaaacgatatttcttagatacgggcagcgaagcctggaatatgttcgggccaaccgaaacaactatctggtcagcggttcagcgcattaacgttgaatgctctcatgccacgataggaaggccaatcgccaatacacaaatctatattacggattctcagctcgcgccagtgccggcaggtgttccgggtgagctgtgcattgcaggagacggtgtggcgaagggctactacaaaaaggaagaattaacggattcgagattcattgacaacccttttgagcctgggtctaagctttatagaacgggagacatggcccgttggcttacgggagggcgaattgaatatataggccgcatcgataatcaagtaaaaatccgcggattccgtattgaacttggtgatattgaaagcaggcttagtgagcatcccggcattctggaatgcgttgtggtcgcagatatggataacctagctgcctattatacagctaaacatgcaaatgcttctctcacagcgagagagctgcgtcattttgtgaaaaacgctttgcctgcctatatggtgccttcttattttattcagcttgatcatatgccgttaactccgaacggaaagatagatagaaacagccttaagaatatcgatttatcaggggagcagctaaagcaaaggcagacctctcctaagaacattcaggatactgttgcacaaatatggtctgaggttctcggcagaaagcaaattggcattcatgacgatttctttgcgctcggagggcattccttgaaggccatgaccgccgcgtcccgcatcaagaaagagctcgggattgatcttccagtgaagcttttgtttgaagcgccgacgatcgccggcatttcagcgtatttgaaaaacgggggctctgatggcttgcaggatgtaacgataatgaatcaggatcaggagcagatcattttcgcatttccgccggttctgggctatggccttatgtaccaaaatctgtccagccgcttgccgtcatacaagctatgcgcctttgattttattgaggaggaagaccggcttgaccgctatgcggatttgatccagaagctgcagccggaagggcctttaacattgtttggatattcagcgggatgcagcctggcgtttgaagctgcgaaaaagcttgaggaacaaggccgtattgttcagcggatcatcatggtggattcctataaaaaacaaggtgtcagtgatctggacggacgcacggttgaaagtgatgtcgaagcgttgatgaatgtcaatcgggacaatgaagcgctcaacagcgaagccgtcaaacacggcctcaagcaaaaaacacatgccttttactcatactacgtcaacctgatcagcacaggccaggtgaaagcagatattgatctgttgacttccggcgctgattttgacatgccggaatggcttgcatcatgggaagaagctacaacaggtgtttaccgtgtgaaaagaggcttcggaacacacgcagaaatgctgcagggcgaaacgctagataggaatgcggagattttgctcgaatttcttaatacacaaaccgtaacggtttcataaatgaagtgatgaaaggaggagacagccaatgagccaactcttcaaatcatttgatgcgtcggaaaaaacacagctcatctgttttccgtttgccggcggctattcggcgtcgtttcgccctctccatgcttttttgcagggggagtgcgagatgctcgctgccgagccgccgggacacggcacgaatcaaacgtcagccattgaggatctcgaagagctgacggatttgtacaagcaagaactgaaccttcgccctgatcggccgtttgtgctgttcggacacagtatgggcggaatgatcaccttcaggctggcgcaaaagcttgagcgtgaaggcatctttccgcaggcggttatcatttctgcaatccagccgcctcatattcagcggaagaaagtgtcccacctgcctgatgatcagtttctcgatcatattatccaattaggcggaatgcccgcagagcttgttgaaaataaggaggtcatgtcctttttcctgccttctttccgatcagattaccgggctcttgaacaatttgagctttacgatctggcccagatccagtcgcctgttcatgtctttaacgggcttgatgataaaaaatgcatacgagatgcggaagggtggaagaagtgggcaaaagacatcacattccatcaatttgacggcgggcacatgttcctgctgtcacaaacggaagaagtcgcagaacggatttttgcgatcttgaatcagcatccgatcattcaaccgtgaagccgccccgcagggcgctccgcaggccgcttccggaccactccggaagcggccgtgcggtcggaggatcc

SEQ ID NO: 30 - DNA, 5259 bp, Artificial Sequence; identical to SEQ ID NO: 23
  Description of Artificial Sequence: Synthetic polynucleotide

SEQ ID NO: 31 - DNA, 5250 bp, Artificial Sequence; identical to SEQ ID NO: 29
  Description of Artificial Sequence: Synthetic polynucleotide

SEQ ID NO: 32 - DNA, 606 bp, Bacillus sp.
atcgacaaaaatgtcatgaaagaatcgttgtaagacgctcttcgcaagggtgtctttttttgcctttttttcggtttttgcgcggtacacatagtcatgtaaagattgtaaattgcattcagcaataaaaaaagattgaacgcagcagtttggtttaaaaatttttatttttctgtaaataatgtttagtggaaatgattgcggcatcccgcaaaaaatattgctgtaaataaactggaatctttcggcatcccgcatgaaacttttcacccatttttcggtgataaaaacatttttttcatttaaactgaacggtagaaagataaaaaatattgaaaacaatgaataaatagccaaaattggtttcttattagggtggggtcttgcggtctttatccgcttatgttaaacgccgcaatgctgactgacggcagcctgctttaatagcggccatctgttttttgattggaagcactgctttttaagtgtagtactttgggctatttcggctgttagttcataagaattaaaagctgatatggataagaaagagaaaatgcgttgcacatgttcactgcttataaagattaggggaggtatgacaat

SEQ ID NO: 33 - DNA, 729 bp, Bacillus sp.
atgagccaactcttcaaatcatttgatgcgtcggaaaaaacacagctcatctgttttccgtttgccggcggctattcggcgtcgtttcgccctctccatgcttttttgcagggggagtgcgagatgctcgctgccgagccgccgggacacggcacgaatcaaacgtcagccattgaggatctcgaagagctgacggatttgtacaagcaagaactgaaccttcgccctgatcggccgtttgtgctgttcggacacagtatgggcggaatgatcaccttcaggctggcgcaaaagcttgagcgtgaaggcatctttccgcaggcggttatcatttctgcaatccagccgcctcatattcagcggaagaaagtgtcccacctgcctgatgatcagtttctcgatcatattatccaattaggcggaatgcccgcagagcttgttgaaaataaggaggtcatgtcctttttcctgccttctttccgatcagattaccgggctcttgaacaatttgagctttacgatctggcccagatccagtcgcctgttcatgtctttaacgggcttgatgataaaaaatgcatacgagatgcggaagggtggaagaagtgggcaaaagacatcacattccatcaatttgacggcgggcacatgttcctgctgtcacaaacggaagaagtcgcagaacggatttttgcgatcttgaatcagcatccgatcattcaaccgtga

SEQ ID NO: 34 - DNA, 20 bp, Artificial Sequence
  Description of Artificial Sequence: Synthetic primer
cacgagcatttcaaatcttg

SEQ ID NO: 35 - DNA, 18 bp, Artificial Sequence
  Description of Artificial Sequence: Synthetic primer
ctgaacaatacggccttg

SEQ ID NO: 36 - DNA, 20 bp, Artificial Sequence
  Description of Artificial Sequence: Synthetic primer
cacgagcatttcaaatcttg

SEQ ID NO: 37 - DNA, 18 bp, Artificial Sequence
  Description of Artificial Sequence: Synthetic primer
ctgaacaatacggccttg

SEQ ID NO: 38 - DNA, 20 bp, Artificial Sequence
  Description of Artificial Sequence: Synthetic primer
cacgagcatttcaaatcttg

SEQ ID NO: 39 - DNA, 18 bp, Artificial Sequence
  Description of Artificial Sequence: Synthetic primer
ctgaacaatacggccttg

SEQ ID NO: 40 - protein, 10 aa, Bacillus sp.
DILQLGMIWK

SEQ ID NO: 41 - protein, 10 aa, Bacillus subtilis
DILQLGLIWK

SEQ ID NO: 42 - protein, 10 aa, Streptomyces roseosporus
DILQLGVIWK

SEQ ID NO: 43 - protein, 3587 aa, Artificial Sequence
  Description of Artificial Sequence: Synthetic polypetide
MEITFYPLTDAQKRIWYTEKFYPHTSISNLAGIGKLVSADAIDYVLVEQAIQEFIRRNDAMRLRLRLDENGEPVQYISEYRPVDIKHTDTTEDPNAIEFISQWSREETKKPLPLYDCDLFRFSLFTIKENEVWFYANVHHVISDGISMNILGNAIMHIYLELASGSETKEGISHSFIDHVLSEQEYAQSKRFEKDKAFWNKQFESVPELVSLKRNASAGGSLDAERFSKDVPEALHQQILSFCEANKVSVLSVFQSLLAAYLYRVSGQNDVVTGTFMGNRTNAKEKQMLGMFVSTVPLRTNIDGGQAFSEFVKDRMKDLMKTLRHQKYPYNLLINDLRETKSSLTKLFTVSLEYQVMQWQKEEDLAFLTEPIFSGSGLNDVSIHVKDRWDTGKLTIDFDYRTDLFSREEINMICERMITMLENALTHPEHTIDELTLISDAEKEKLLARAGGKSVSYRKDMTIPELFQEKAELLSDHPAVVFEDRTLSYRTLHEQSARIANVLKQKGVGPDSPVAVLIERSERMITAIMGILKAGGAYVPIDPGFPAERIQYILEDCGADFILTESKVAAPEADAELIDLDQAIEEGAEESLNADVNARNLAYIIYTSGTTGRPKGVMIEHRQVHHLVESLQQTIYQSGSQTLRMALLAPFHFDASVKQIFASLLLGQTLYIVPKKTVTNGAALTAYYRKNSIEATDGTPAHLQMLAAAGDFEGLKLKHMLIGGEGLSSVVADKLLKLFKEAGTAPRLTNVYGPTETCVDASVHPVIPENAVQSAYVPIGKALGNNRLYILDQKGRLQPEGVAGELYIAGDGVGRGYLHLPELTEEKFLQDPFVPGDRMYRTGDVVRWLPDGTIEYLGREDDQVKVRGYRIELGEIEAVIQQAPDVAKAVVLARPDEQGNLEVCAYVVQKPGSEFAPAGLREHAARQLPDYMVPAYFTEVTEIPLTPSGKVDRRKLFALEVKAVSGTAYTAPRNETEKAIAAIWQDVLNVEKAGIFDNFFETGGHSLKAMTLLTKIHKETGIEIPLQFLFEHPTITALAEEADHRESKAFAVIEPAEKQEHYPLSLAQQRTYIVSQFEDAGVGYNMPAAAILEGPLDIQKLERAFQGLIRRHESLRTSFVLENSTPRQKIHDSVDFNIEMIERGGRSDEAIMASFVRTFDLAKAPLFRIGLLGLEENRHMLLFDMHHLISDGVSIGIMLEELARIYKGEQLPDLRLQYKDYAVWQSRQAAEGYKKDQAYWKEVFAGELPVLQLLSDYPRPPVQSFEGDRVSIKLDAGVKDRLNRLAEQNGATLYMVMLSAYYTLLSKYTGQDDIIVGTPSAGRNHSDTEGIIGMFVNTLAIRSEVKQNETFTQLISRVRKRVLDAFSHQDYPFEWLVEDLNIPRDVSRHPLFDTMFSLQNATEGIPAVGDLSLSVQETNFKIAKFDLTVQARETDEGIEIDVDYSTKLFKQSTADRLLTHFARLLEDAAADPEKPISEYKLLSEEEAASQIQQFNPGRTPYPKDKTIVQLFEEQAANTPDHTALQYEGESLTYRELNERANRLARGILSLGAGEGRTAAVLCERSMDMIVSILAVLKSGSAYVPIDPEHPIQRMQHFFRDSGAKVLLTQRKLKALAEEAEFKGVIVLADEEESYHADARNLALPLDSAAMANLTYTSGTTGTPKGNIVTHANILRTVKETNYLSITEQDTILGLSNYVFDAFMFDMFGSLLNGAKLVLIPKETVLDMARLSRVIERENISILMITTALFHLLVDLNPACLSTLRKIMFGGERASVEHVRKALQTVGKGKLLHMYGPSESTVFATYHPVDELEEHTLSVPIGKPVSNTEVYILDRTGHVQPAGIAGELCVSGEGLVKGYYNRPELTEEKFVPHPFTSGERMYKTGDLARWLPNGDIEFIGRIDHQVKIRGQRIELGEIEHQLQTHDRVQESVVLAVDQGAGDKLLCAYYVGEGDISSQEMREHAAKDLPAYMVPAVFIQMDELPLTGNGKIDRRALPIPDANVSRGVSYVAPRNGTEQKVADIWAQVLQAEQVGAYDHFFDIGGHSLAGMKMLALVHQELGVELSLKDLFQSPTVEGLAQVIASAEKGTAASISPAEKQDTYPVSSPQKRMYVLQQLEDAQTSYNMPAVLRLTGELDVERLNSVMQQLMQRHEALRTTFEIKDGETVQRIWEEAECEIAYFEAPEEETERIVSEFIKPFKIDQLPLFRIGLIKHSDTEHVLLFDMHHIISDGASVGVLIEELSKLYDGETLEPLRIQYKDYAVWQQQFIQSELYKKQEEHWLKELDGELPVLTLPTDYSRPAVQTFEGDRIAFSLEAGKADALRRLAKETDSTLYMVLLASYSAFLSKISGQDDIIVGSPVAGRSQADVSRVIGMFVNTLALRTYPKGEKTFADYLNEVKETALSAFDAQDYPLEDLIGNVQVQRDTSRNPLFDAVFSMQNANIKDLTMKGIQLEPHPFERKTAKFDLTLTADETDGGLTFVLEYNTALFKQETIERWKQYWMELLDAVTGNPNQPLSSLSLVTETEKQALLEAWKGKALPVPTDKTVHQLFEETAQRHKDRPAVTYNGQSWTYGELNAKANRLARILMDCGISPDDRVGVLTKPSLEMSAAVLGVLKAGAAFVPIDPDYPDQRIEYILQDSGAKLLLKQEGISVPDSYTGDVILLDGSRTILSLPLDENDEENPETAVTAENLAYMIYTSGTTGQPKGVMVEHHALVNLCFWHHDAFSMTAEDRSAKYAGFGFDASIWEMFPTWTIGAELHVIEEAIRLDIVRLNDYFETNGVTITFLPTQLAEQFMELENTSLRVLLTGGDKLKRAVKKPYTLVNNYGPTENTVVATSAEIHPEEGSLSIGRAIANTRVYILGEGNQVQPEGVAGELCVAGRGLARGYLNREDETAKRFVADPFVPGERMYRTGDLVKWTGGGIEYIGRIDQQVKVRGYRIELSEIEVQLAQLSEVQDAAVTAVKDKGGNTAIAAYVTPESADIEALKSALKETLPDYMIPAFWVTLNELPVTANGKVDRKALPEPDIEAGSGEYKAPTTDMEELLAGIWQDVLGMSEVGVTDNFFSLGGDSIKGIQMASRLNQHGWKLEMKDLFQHPTIEELTQYVERAEGKQADQGPVEGEVILTPIQRWFFEKNFTNKHHWNQSVMLHAKKGFDPERVEKTLQALIEHHDALRMVYREGQEDVIQYNRGLEAASAQLEVIQIEGQAADYEDRIEREAERLQSSIDLQEGGLLKAGLFQAEDGDHLLLAIHHLVVDGVSWRILLEDFAAVYTQLEQGNEPVLPQKTHSFAEYAERLQDFANSKAFLKEKEYWRQLEEQAVAAKLPKDRESGDQRMKHTKTIEFSLTAEETEQLTTKVHEAYHTEMNDILLTAFGLAMKEWTGQDRVSVHLEGHGREEIIEDLTISRTVGWFTSMYPMVLDMKHADDLGYQLKQMKEDIRHVPNKGVGYGILRYLTAPEHKEDVAFSIQPDVSFNYLGQFDEMSDAGLFTRSELPSGQSLSPETEKPNALDVVGYIENGKLTMSLAYHSLEFHEKTVQTFSDSFKAHLLRIIEHCLSQDGTELTPSDLGDDDLTLDELDKLMEIF

SEQ ID NO: 44 - protein, 3583 aa, Artificial Sequence
  Description of Artificial Sequence: Synthetic polypetide
MSKKSIQKVYALTPMQEGMLYHAMLDPHSSSYFTQLELGIHGAFDLEIFEKSVNELIRSYDILRTVFVHQQLQKPRQVVLAERKTKVHYEDISHADENRQKEHIERYKQDVQRQGFNLAKDILFKVAVFRLAADQLYLVWSNHHIMMDGWSMGVLMKSLFQNYEALRAGRTPANGQGKPYSDYIKWLGKQDNEEAESYWSERLAGFEQPSVLPGRLPVKKDEYVNKEYSFTWDETLVARIQQTANLHQVTGPNLFQAVWGIVLSKYNFTDDVIFGTVVSGRPSEINGIETMAGLFINTIPVRVKVERDAAFADIFTAVQQHAVEAERYDYVPLYEIQKRSALDGNLLNHLVAFENYPLDQELENGSMEDRLGFSIKVESAFEQTSFDFNLIVYPGKTWTVKIKYNGAAFDSAFIERTAEHLTRMMEAAVDQPAAFVREYGLVGDEEQRQIVEVFNSTKAELPEGMAVHQVFEEQAKRTPASTAVVYEGTKLTYRELNAAANRLARKLVEHGLQKGETAAIMNDRSVETVVGMLAVLKAGAAYVPLDPALPGDRLRFMAEDSSVRMVLIGNSYTGQAHQLQVPVLTLDIGFEESEAADNLNLPSAPSDLAYIMYTSGSTGKPKGVMIEHKSILRLVKNAGYVPVTEEDRMAQTGAVSFDAGTFEVFGALLNGAALYPVKKETLLDAKQFAAFLREQSITTMWLTSPLFNQLAAKDAGMFGTLRHLIIGGDALVPHIVSKVKQASPSLSLWNGYGPTENTTFSTSFLIDREYGGSIPIGKPIGNSTAYIMDEQQCLQPIGAPGELCVGGIGVARGYVNLPELTEKQFLEDPFRPGERIYRTGDLARWLPDGNIEFLGRIDNQVKVRGFRIELGEIETKLNMAEHVTEAAVIIRKNKADENEICAYFTADREVAVSELRKTLSQSLPDYMVPAHLIQMDSLPLTPNGKINKKELPAPQSEAVQPEYAAPKTESEKKLAEIWEGILGVKAGVTDNFFMIGGHSLKAMMMTAKIQEHFHKEVPIKVLFEKPTIQELALYLEENESKEEQTFEPIRQASYQQHYPVSPAQRRMYILNQLGQANTSYNVPAVLLLEGEVDKDRLENAIQQLINRHEILRTSFDMIDGEVVQTVHKNISFQLEAAKGREEDAEEIIKAFVQPFELNRAPLVRSKLVQLEEKRHLLLIDMHHIITDGSSTGILIGDLAKIYQGADLELPQIHYKDYAVWHKEQTNYQKDEEYWLDVFKGELPILDLPADFERPAERSFAGERVMFGLDKQITAQIKSLMAETDTTMYMFLLAAFNVLLSKYASQDDIIVGSPTAGRTHPDLQGVPGMFVNTVALRTAPAGDKTFAQFLEEVKTASLQAFEHQSYPLEELIEKLPLTRDTSRSPLFSVMFNMQNMEIPSLRLGDLKISSYSMLHHVAKFDLSLEAVEREEDIGLSFDYATALFKDETIRRWSRHFVNIIKAAAANPNVRLSDVDLLSSAETAALLEERHMTQITEATFAALFEKQAQQTPDHSAVKAGGNLLTYRELDEQANQLAHHLRAQGAGNEDIVAIVMDRSAEVMVSILGVMKAGAAFLPIDPDTPEERIRYSLEDSGAKFAVVNERNMTAIGQYEGIIVSLDDGKWRNESKERPSSISGSRNLAYVIYTSGTTGKPKGVQIEHRNLTNYVSWFSEEAGLTENDKTVLLSSYAFDLGYTSMFPVLLGGGELHIVQKETYTAPDEIAHYIKEHGITYIKLTPSLFHTIVNTASFAKDANFESLRLIVLGGEKIIPTDVIAFRKMYGHTEFINHYGPTEATIGAIAGRVDLYEPDAFAKRPTIGRPIANAGALVLNEALKLVPPGASGQLYITGQGLARGYLNRPQLTAERFVENPYSPGSLMYKTGDVVRRLSDGTLAFIGRADDQVKIRGYRIEPKEIETVMLSLSGIQEAVVLAVSEGGLQELCAYYTSDQDIEKAELRYQLSLTLPSHMIPAFFVQVDAIPLTANGKTDRNALPKPNAAQSGGKALAAPETALEESLCRIWQKTLGIEAIGIDDNFFDLGGHSLKGMMLIANIQAELEKSVPLKALFEQPTVRQLAAYMEASAVSGGHQVLKPADKQDMYPLSSAQKRMYVLNQLDRQTISYNMPSVLLMEGELDISRLRDSLNQLVNRHESLRTSFMEANGEPVQRIIEKAEVDLHVFEAKEDEADQKIKEFIRPFDLNDAPLIRAALLRIEAKKHLLLLDMHHIIADGVSRGIFVKELALLYKGEQLPEPTLHYKDFAVWQNEAEQKERMKEHEAYWMSVLSGELPELDLPLDYARPPVQSFKGDTIRFRTGSETAKAVEKLLAETGTTLHMVLHAVFHVFLSKISGQRDIVIGSVTAGRTNADVQDMPGMFVNTLALRMEAKEQQTFAELLELAKQTNLSALEHQEYPFEDLVNQLDLPRDMSRNPLFNVMVTTENPDKEQLTLQNLSISPYEAHQGTSKFDLTLGGFTDENGIGLQLEYATDLFAKETAEKWSEYVLRLLKAVADNPNQPLSSLLLVTETEKQALLEAWKGKALPVPTDKTVHQLFEETVQRHKDRPAVTYNGQSWTYGELNAKANRLARILMDCGISPDDRVGVLTKPSLEMSAAVLGVLKAGAAFVPIDPDYPDQRIEYILQDSGAKLLLKQEGISVPDSYTGDVILLDGSRTILSLPLDENDEGNPETAVTAENLAYMIYTSGTTGQPKGVMVEHHALVNLCFWHHDAFSMTAEDRSAKYAGFGFDASIWEMFPTWTIGAELHVIDEAIRLDIVRLNDYFETNGVTITFLPTQLAEQFMELENTSLRVLLTGGDKLKRAVKKPYTLVNNYGPTENTVVATSAEIHPEEGSLSIGRAIANTRVYILGEGNQVQPEGVAGELCVAGRGLARGYLNREDETAKRFVADPFVPGERMYRTGDLVKWVNGGIEYIGRIDQQVKVRGYRIELSEIEVQLAQLSEVQDAAVTAVKDKGGNTAIAAYVTPETADIEALKSTLKETLPDYMIPAFWVTLNELPVTANGKVDRKALPEPDIEAGSGEYKAPTTDMEELLAGIWQDVLGMSEVGVTDNFFSLGGDSIKGIQMASRLNQHGWKLEMKDLFQHPTIEELTQYVERAEGKQADQGPVEGEVILTPIQRWFFEKNFTNKHHWNQSVMLHAKKGFDPERVEKTLQALIEHHDALRMVYREENGDIVQVYKPIGESKVSFEIVDLYGSDEEMLRSQIKLLANKLQSSLDLRNGPLLKAEQYRTEAGDHLLIAVHHLVVDGVSWRILLEDFASGYMQAEKEESLVFPQKTNSFKDWAEELAAFSQSAHLLQQAEYWSQIAAEQVSPLPKDCETEQRIVKDTSSVLCELTAEDTKHLLTDVHQPYGTEINDILLSALGLTMKEWTKGAKIGINLEGHGREDIIPNVNISRTVGWFTAQYPVVLDISDADASAVIKTVKENLRRIPDKGVGYGILRYFTETAETKGFTPEISFNYLGQFDSEVKTDFFEPSAFDMGRQVSGESEALYALSFSGMIRNGRFVLSCSYNEKEFERATVEEQMERFKENLLMLIRHCTEKEDKEFTPSDFSAEDLEMDEMGDIFDMLEENLK

SEQ ID NO: 45 - protein, 1275 aa, Artificial Sequence
  Description of Artificial Sequence: Synthetic polypetide
MSQFSKDQVQDMYYLSPMQEGMLFHAILNPGQSFYLEQITMKVKGSLNIKCLEESMNVIMDRYDVFRTVFIHEKVKRPVQVVLKKRQFHIEEIDLTHLTGSEQTAKINEYKEQDKIRGFDLTRDIPMRAAIFKKAEESFEWVWSYHHIILDGWCFGIVVQDLFKVYNALREQKPYSLPPVKPYKDYIKWLEKQDKQASLRYWREYLEGFEGQTTFAEQRKKQKDGYEPKELLFSLSEAETKAFTELAKSQHTTLSTALQAVWSVLISRYQQSGDLAFGTVVSGRPAEIKGVEHMVGLFINVVPRRVKLSEGITFNGLLKRLQEQSLQSEPHQYVPLYDIQSQADQPKLIDHIIVFENYPLQDAKNEESSENGFDMVDVHVFEKSNYDLNLMASPGDEMLIKLAYNENVFDEAFILRLKSQLLTAIQQLIQNPDQPVSTINLVDDREREFLLTGLNPPAQAHETKPLTYWFKEAVNANPDAPALTYSGQTLSYRELDEEANRIARRLQKHGAGKGSVVALYTKRSLELVIGILGVLKAGAAYLPVDPKLPEDRISYMLADSAAACLLTHQEMKEQAAELPYTGTTLFIDDQTRFEEQASDPATAIDPNDPAYIMYTSGTTGKPKGNITTHANIQGLVKHVDYMAFSDQDTFLSVSNYAFDAFTFDFYASMLNAARLIIADEHTLLDTERLTDLILQENVNVMFATTALFNLLTDAGEDWMKGLRCILFGGERASVPHVRKALRIMGPGKLINCYGPTEGTVFATAHVVHDLPDSISSLPIGKPISNASVYILNEQSQLQPFGAVGELCISGMGVSKGYVNRADLTKEKFIENPFKPGETLYRTGDLARWLPDGTIEYAGRIDDQVKIRGHRIELEEIEKQLQEYPGVKDAVVVADRHESGDASINAYLVNRTQLSAEDVKAHLKKQLPAYMVPQTFTFLDELPLTTNGKVNKRLLPKPDQDQLAEEWIGPRNEMEETIAQIWSEVLGRKQIGIHDDFFALGGHSLKAMTAASRIKKELGIDLPVKLLFEAPTIAGISAYLKNGGSDGLQDVTIMNQDQEQIIFAFPPVLGYGLMYQNLSSRLPSYKLCAFDFIEEEDRLDRYADLIQKLQPEGPLTLFGYSAGCSLAFEAAKKLEEQGRIVQRIIMVDSYKKQGVSDLDGRTVESDVEALMNVNRDNEALNSEAVKHGLKQKTHAFYSYYVNLISTGQVKADIDLLTSGADFDMPEWLASWEEATTGVYRVKRGFGTHAEMLQGETLDRNAEILLEFLNTQTVTVS

SEQ ID NO: 46 - DNA, 5247 bp, Artificial Sequence
  Description of Artificial Sequence: Synthetic polynucleotide
gaattcgcatgcatcgacaaaaatgtcatgaaagaatcgttgtaagacgctcttcgcaagggtgtctttttttgcctttttttcggtttttgcgcggtacacatagtcatgtaaagattgtaaattgcattcagcaataaaaaaagattgaacgcagcagtttggtttaaaaatttttatttttctgtaaataatgtttagtggaaatgattgcggcatcccgcaaaaaatattgctgtaaataaactggaatctttcggcatcccgcatgaaacttttcacccatttttcggtgataaaaacatttttttcatttaaactgaacggtagaaagataaaaaatattgaaaacaatgaataaatagccaaaattggtttcttattagggtggggtcttgcggtctttatccgcttatgttaaacgccgcaatgctgactgacggcagcctgctttaatagcggccatctgttttttgattggaagcactgctttttaagtgtagtactttgggctatttcggctgttagttcataagaattaaaagctgatatggataagaaagagaaaatgcgttgcacatgttcactgcttataaagattaggggaggtatgacaatatggaaataactttttaccctttaacggatgcacaaaaacgaatttggtacacagaaaaattttatcctcacacgagcatttcaaatcttgcggggattggtaagctggtttcagctgatgcgattgattatgtgcttgttgagcaggcgattcaagagtttattcgcagaaatgacgccatgcgccttcggttgcggctagatgaaaacggggagcctgttcaatatattagcgagtatcggcctgttgatataaaacatactgacactactgaagatccgaatgcgatagagtttatttcacaatggagccgggaggaaacgaagaaacctttgccgctatacgattgtgatttgttccgtttttccttgttcaccataaaggaaaatgaagtgtggttttacgcaaatgttcatcacgtgatttctgatggtatctccatgaatattctcgggaatgcgatcatgcacatttatttagaattagccagcggctcagagacaaaagaaggaatctcgcattcatttatcgatcatgttttatctgaacaggaatatgctcaatcgaagcggtttgaaaaggacaaggcgttttggaacaaacaatttgaatcggtgcctgaacttgtttccttgaaacggaatgcatccgcagggggaagtttagatgctgagaggttctctaaagatgtgcctgaagcgcttcatcagcagattctgtcgttttgtgaggcgaataaagtcagtgttctttcggtatttcaatcgctgctcgccgcctatttgtacagggtcagcggccagaatgatgttgtgacgggaacatttatgggcaaccggacaaatgcgaaagagaagcagatgcttggcatgtttgtttctacggttccgcttcggacaaacattgacggcgggcaggcgttttcagaatttgtcaaagaccggatgaaggatctgatgaagacacttcgccaccaaaagtatccgtataatctcctaatcaacgatttgcgtgaaacaaagagctctctgaccaagctgttcacggtttctcttgaatatcaagtgatgcagtggcagaaagaagaggatcttgcctttttgactgagccgattttcagcggcagcggattaaatgatgtctcaattcatgtaaaggatcgatgggatactgggaaactcaccatagattttgattaccgcactgatttattttcacgtgaagaaatcaacatgatttgtgagcgcatgattaccatgctggagaacgcgttaacgcatccagaacatacaattgatgaattaacactgatttctgatgcggagaagcagatgattctcaaaacatggaacgccacaggaaaaacgtatccatatataacttttcatgagttgtttgagcagcaggcgaaaaagacgcctgatagagcggctgtcagctatgaaggtcaaacattgacgtatcgggagcttgatgagaaaagcacacagctggccatttatttgcaggcgcatggagtgggtcctgaccgtctggcggggatctatgtggatcgatcgctggacatgctagtgggtttattagcgatcctcaaggctgggggagcgtatgtgccgctagacccgtcctatccggctgaacgattagaatacatgcttgaggacagtgaagttttcattacactgacgacatcggaattagtaaatacgttgagttggaacggtgtcacaacagcccttttagatcaagattgggatgaaattgctcaaacagcctctgatcgaaaagtgcttacacgcactgtcacgccagagaacttggcatatgtcatttatacatccggcagcacaggaaagccaaaaggtgtcatgataccacataaagctttgacaaactttctcgtttcgatgggggaaacaccaggtcttacggcagaggataaaatgcttgctgtcacaacctactgttttgatattgcagctctggaattatttttgcctttaataaagggcgcacactgctatatttgtcaaacggagcatacaaaagacgttgaaaaactgaaacgggacatccgcgcgatcaaaccgacagtgatgcaggcaacccccgctacgtggaagatgctcttttattcaggctgggaaaatgaagagagcgtgaaaattttatgcggtggcgaagcattgcctgagacattaaaacgatatttcttagatacgggcagcgaagcctggaatatgttcgggccaaccgaaacaactatctggtcagcggttcagcgcattaacgttgaatgctctcatgccacgataggaaggccaatcgccaatacacaaatctatattacggattctcagctcgcgccagtgccggcaggtgttccgggtgagctgtgcattgcaggagacggtgtggcgaagggctactacaaaaaggaagaattaacggattcgagattcattgacaacccttttgagcctgggtctaagctttatagaacgggagacatggcccgttggcttacgggagggcgaattgaatatataggccgcatcgataatcaagtaaaaatccgcggattccgtattgaacttggtgatattgaaagcaggcttagtgagcatcccggcattctggaatgcgttgtggtcgcagatatggataacctagctgcctattatacagctaaacatgcaaatgcttctctcacagcgagagagctgcgtcattttgtgaaaaacgctttgcctgcctatatggtgccttcttattttattcagcttgatcatatgccgttaactccgaacggaaagatagatagaaacagccttaagaatatcgatttatcaggggagcagctaaagcaaaggcagacctctcctaagaacattcaggatactgtttttaccatttggcaggaagtgctgaaaacgagtgacattgaatgggatgacttctttgcgctcggagggcattccttgaaggccatgaccgccgcgtcccgcatcaagaaagagctcgggattgatcttccagtgaagcttttgtttgaagcgccgacgatcgccggcatttcagcgtatttgaaaaacgggggctctgatggcttgcaggatgtaacgataatgaatcaggatcaggagcagatcattttcgcatttccgccggttctgggctatggccttatgtaccaaaatctgtccagccgcttgccgtcatacaagctatgcgcctttgattttattgaggaggaagaccggcttgaccgctatgcggatttgatccagaagctgcagccggaagggcctttaacattgtttggatattcagcgggatgcagcctggcgtttgaagctgcgaaaaagcttgaggaacaaggccgtattgttcagcggatcatcatggtggattcctataaaaaacaaggtgtcagtgatctggacggacgcacggttgaaagtgatgtcgaagcgttgatgaatgtcaatcgggacaatgaagcgctcaacagcgaagccgtcaaacacggcctcaagcaaaaaacacatgccttttactcatactacgtcaacctgatcagcacaggccaggtgaaagcagatattgatctgttgacttccggcgctgattttgacatgccggaatggcttgcatcatgggaagaagctacaacaggtgtttaccgtgtgaaaagaggcttcggaacacacgcagaaatgctgcagggcgaaacgctagataggaatgcggagattttgctcgaatttcttaatacacaaaccgtaacggtttcataaatgaagtgatgaaaggaggagacagccaatgagccaactcttcaaatcatttgatgcgtcggaaaaaacacagctcatctgttttccgtttgccggcggctattcggcgtcgtttcgccctctccatgcttttttgcagggggagtgcgagatgctcgctgccgagccgccgggacacggcacgaatcaaacgtcagccattgaggatctcgaagagctgacggatttgtacaagcaagaactgaaccttcgccctgatcggccgtttgtgctgttcggacacagtatgggcggaatgatcaccttcaggctggcgcaaaagcttgagcgtgaaggcatctttccgcaggcggttatcatttctgcaatccagccgcctcatattcagcggaagaaagtgtcccacctgcctgatgatcagtttctcgatcatattatccaattaggcggaatgcccgcagagcttgttgaaaataaggaggtcatgtcctttttcctgccttctttccgatcagattaccgggctcttgaacaatttgagctttacgatctggcccagatccagtcgcctgttcatgtctttaacgggcttgatgataaaaaatgcatacgagatgcggaagggtggaagaagtgggcaaaagacatcacattccatcaatttgacggcgggcacatgttcctgctgtcacaaacggaagaagtcgcagaacggatttttgcgatcttgaatcagcatccgatcattcaaccgtgaagccgccccgcagggcgctccgcaggccgcttccggaccactccggaagcggccgtgcggtcggaggatcc

SEQ ID NO: 47 - DNA, 5247 bp, Artificial Sequence
  Description of Artificial Sequence: Synthetic polynucleotide
gaattcgcatgcatcgacaaaaatgtcatgaaagaatcgttgtaagacgctcttcgcaagggtgtctttttttgcctttttttcggtttttgcgcggtacacatagtcatgtaaagattgtaaattgcattcagcaataaaaaaagattgaacgcagcagtttggtttaaaaatttttatttttctgtaaataatgtttagtggaaatgattgcggcatcccgcaaaaaatattgctgtaaataaactggaatctttcggcatcccgcatgaaacttttcacccatttttcggtgataaaaacatttttttcatttaaactgaacggtagaaagataaaaaatattgaaaacaatgaataaatagccaaaattggtttcttattagggtggggtcttgcggtctttatccgcttatgttaaacgccgcaatgctgactgacggcagcctgctttaatagcggccatctgttttttgattggaagcactgctttttaagtgtagtactttgggctatttcggctgttagttcataagaattaaaagctgatatggataagaaagagaaaatgcgttgcacatgttcactgcttataaagattaggggaggtatgacaatatggaaataactttttaccctttaacggatgcacaaaaacgaatttggtacacagaaaaattttatcctcacacgagcatttcaaatcttgcggggattggtaagctggtttcagctgatgcgattgattatgtgcttgttgagcaggcgattcaagagtttattcgcagaaatgacgccatgcgccttcggttgcggctagatgaaaacggggagcctgttcaatatattagcgagtatcggcctgttgatataaaacatactgacactactgaagatccgaatgcgatagagtttatttcacaatggagccgggaggaaacgaagaaacctttgccgctatacgattgtgatttgttccgtttttccttgttcaccataaaggaaaatgaagtgtggttttacgcaaatgttcatcacgtgatttctgatggtatctccatgaatattctcgggaatgcgatcatgcacatttatttagaattagccagcggctcagagacaaaagaaggaatctcgcattcatttatcgatcatgttttatctgaacaggaatatgctcaatcgaagcggtttgaaaaggacaaggcgttttggaacaaacaatttgaatcggtgcctgaacttgtttccttgaaacggaatgcatccgcagggggaagtttagatgctgagaggttctctaaagatgtgcctgaagcgcttcatcagcagattctgtcgttttgtgaggcgaataaagtcagtgttctttcggtatttcaatcgctgctcgccgcctatttgtacagggtcagcggccagaatgatgttgtgacgggaacatttatgggcaaccggacaaatgcgaaagagaagcagatgcttggcatgtttgtttctacggttccgcttcggacaaacattgacggcgggcaggcgttttcagaatttgtcaaagaccggatgaaggatctgatgaagacacttcgccaccaaaagtatccgtataatctcctaatcaacgatttgcgtgaaacaaagagctctctgaccaagctgttcacggtttctcttgaatatcaagtgatgcagtggcagaaagaagaggatcttgcctttttgactgagccgattttcagcggcagcggattaaatgatgtctcaattcatgtaaaggatcgatgggatactgggaaactcaccatagattttgattaccgcactgatttattttcacgtgaagaaatcaacatgatttgtgagcgcatgattaccatgctggagaacgcgttaacgcatccagaacatacaattgatgaattaacactgatttctgatgcggagaagcagatgattctcaaaacatggaacgccacaggaaaaacgtatccatatataacttttcatgagttgtttgagcagcaggcgaaaaagacgcctgatagagcggctgtcagctatgaaggtcaaacattgacgtatcgggagcttgatgagaaaagcacacagctggccatttatttgcaggcgcatggagtgggtcctgaccgtctggcggggatctatgtggatcgatcgctggacatgctagtgggtttattagcgatcctcaaggctgggggagcgtatgtgccgctagacccgtcctatccggctgaacgattagaatacatgcttgaggacagtgaagttttcattacactgacgacatcggaattagtaaatacgttgagttggaacggtgtcacaacagcccttttagatcaagattgggatgaaattgctcaaacagcctctgatcgaaaagtgcttacacgcactgtcacgccagagaacttggcatatgtcatttatacatccggcagcacaggaaagccaaaaggtgtcatgataccacataaagctttgacaaactttctcgtttcgatgggggaaacaccaggtcttacggcagaggataaaatgcttgctgtcacaacctactgttttgatattgcagctctggaattatttttgcctttaataaagggcgcacactgctatatttgtcaaacggagcatacaaaagacgttgaaaaactgaaacgggacatccgcgcgatcaaaccgacagtgatgcaggcaacccccgctacgtggaagatgctcttttattcaggctgggaaaatgaagagagcgtgaaaattttatgcggtggcgaagcattgcctgagacattaaaacgatatttcttagatacgggcagcgaagcctggaatatgttcgggccaaccgaaacaactatctggtcagcggttcagcgcattaacgttgaatgctctcatgccacgataggaaggccaatcgccaatacacaaatctatattacggattctcagctcgcgccagtgccggcaggtgttccgggtgagctgtgcattgcaggagacggtgtggcgaagggctactacaaaaaggaagaattaacggattcgagattcattgacaacccttttgagcctgggtctaagctttatagaacgggagacatggcccgttggcttacgggagggcgaattgaatatataggccgcatcgataatcaagtaaaaatccgcggattccgtattgaacttggtgatattgaaagcaggcttagtgagcatcccggcattctggaatgcgttgtggtcgcagatatggataacctagctgcctattatacagctaaacatgcaaatgcttctctcacagcgagagagctgcgtcattttgtgaaaaacgctttgcctgcctatatggtgccttcttattttattcagcttgatcatatgccgttaactccgaacggaaagatagatagaaacagccttaagaatatcgatttatcaggggagcagctaaagcaaaggcagacctctcctaagaacattcaggatactgtttttaccatttggcaggaagtgctgaacgttgagaaggcggggatctttgacttctttgcgctcggagggcattccttgaaggccatgaccgccgcgtcccgcatcaagaaagagctcgggattgatcttccagtgaagcttttgtttgaagcgccgacgatcgccggcatttcagcgtatttgaaaaacgggggctctgatggcttgcaggatgtaacgataatgaatcaggatcaggagcagatcattttcgcatttccgccggttctgggctatggccttatgtaccaaaatctgtccagccgcttgccgtcatacaagctatgcgcctttgattttattgaggaggaagaccggcttgaccgctatgcggatttgatccagaagctgcagccggaagggcctttaacattgtttggatattcagcgggatgcagcctggcgtttgaagctgcgaaaaagcttgaggaacaaggccgtattgttcagcggatcatcatggtggattcctataaaaaacaaggtgtcagtgatctggacggacgcacggttgaaagtgatgtcgaagcgttgatgaatgtcaatcgggacaatgaagcgctcaacagcgaagccgtcaaacacggcctcaagcaaaaaacacatgccttttactcatactacgtcaacctgatcagcacaggccaggtgaaagcagatattgatctgttgacttccggcgctgattttgacatgccggaatggcttgcatcatgggaagaagctacaacaggtgtttaccgtgtgaaaagaggcttcggaacacacgcagaaatgctgcagggcgaaacgctagataggaatgcggagattttgctcgaatttcttaatacacaaaccgtaacggtttcataaatgaagtgatgaaaggaggagacagccaatgagccaactcttcaaatcatttgatgcgtcggaaaaaacacagctcatctgttttccgtttgccggcggctattcggcgtcgtttcgccctctccatgcttttttgcagggggagtgcgagatgctcgctgccgagccgccgggacacggcacgaatcaaacgtcagccattgaggatctcgaagagctgacggatttgtacaagcaagaactgaaccttcgccctgatcggccgtttgtgctgttcggacacagtatgggcggaatgatcaccttcaggctggcgcaaaagcttgagcgtgaaggcatctttccgcaggcggttatcatttctgcaatccagccgcctcatattcagcggaagaaagtgtcccacctgcctgatgatcagtttctcgatcatattatccaattaggcggaatgcccgcagagcttgttgaaaataaggaggtcatgtcctttttcctgccttctttccgatcagattaccgggctcttgaacaatttgagctttacgatctggcccagatccagtcgcctgttcatgtctttaacgggcttgatgataaaaaatgcatacgagatgcggaagggtggaagaagtgggcaaaagacatcacattccatcaatttgacggcgggcacatgttcctgctgtcacaaacggaagaagtcgcagaacggatttttgcgatcttgaatcagcatccgatcattcaaccgtgaagccgccccgcagggcgctccgcaggccgcttccggaccactccggaagcggccgtgcggtcggaggatcc

SEQ ID NO: 48 - DNA, 5256 bp, Artificial Sequence
  Description of Artificial Sequence: Synthetic polynucleotide
gaattcgcatgcatcgacaaaaatgtcatgaaagaatcgttgtaagacgctcttcgcaagggtgtctttttttgcctttttttcggtttttgcgcggtacacatagtcatgtaaagattgtaaattgcattcagcaataaaaaaagattgaacgcagcagtttggtttaaaaatttttatttttctgtaaataatgtttagtggaaatgattgcggcatcccgcaaaaaatattgctgtaaataaactggaatctttcggcatcccgcatgaaacttttcacccatttttcggtgataaaaacatttttttcatttaaactgaacggtagaaagataaaaaatattgaaaacaatgaataaatagccaaaattggtttcttattagggtggggtcttgcggtctttatccgcttatgttaaacgccgcaatgctgactgacggcagcctgctttaatagcggccatctgttttttgattggaagcactgctttttaagtgtagtactttgggctatttcggctgttagttcataagaattaaaagctgatatggataagaaagagaaaatgcgttgcacatgttcactgcttataaagattaggggaggtatgacaatatggaaataactttttaccctttaacggatgcacaaaaacgaatttggtacacagaaaaattttatcctcacacgagcatttcaaatcttgcggggattggtaagctggtttcagctgatgcgattgattatgtgcttgttgagcaggcgattcaagagtttattcgcagaaatgacgccatgcgccttcggttgcggctagatgaaaacggggagcctgttcaatatattagcgagtatcggcctgttgatataaaacatactgacactactgaagatccgaatgcgatagagtttatttcacaatggagccgggaggaaacgaagaaacctttgccgctatacgattgtgatttgttccgtttttccttgttcaccataaaggaaaatgaagtgtggttttacgcaaatgttcatcacgtgatttctgatggtatctccatgaatattctcgggaatgcgatcatgcacatttatttagaattagccagcggctcagagacaaaagaaggaatctcgcattcatttatcgatcatgttttatctgaacaggaatatgctcaatcgaagcggtttgaaaaggacaaggcgttttggaacaaacaatttgaatcggtgcctgaacttgtttccttgaaacggaatgcatccgcagggggaagtttagatgctgagaggttctctaaagatgtgcctgaagcgcttcatcagcagattctgtcgttttgtgaggcgaataaagtcagtgttctttcggtatttcaatcgctgctcgccgcctatttgtacagggtcagcggccagaatgatgttgtgacgggaacatttatgggcaaccggacaaatgcgaaagagaagcagatgcttggcatgtttgtttctacggttccgcttcggacaaacattgacggcgggcaggcgttttcagaatttgtcaaagaccggatgaaggatctgatgaagacacttcgccaccaaaagtatccgtataatctcctaatcaacgatttgcgtgaaacaaagagctctctgaccaagctgttcacggtttctcttgaatatcaagtgatgcagtggcagaaagaagaggatcttgcctttttgactgagccgattttcagcggcagcggattaaatgatgtctcaattcatgtaaaggatcgatgggatactgggaaactcaccatagattttgattaccgcactgatttattttcacgtgaagaaatcaacatgatttgtgagcgcatgattaccatgctggagaacgcgttaacgcatccagaacatacaattgatgaattaacactgatttctgatgcggagaaagaaaaagtcatttctaaatggaatgagacggcaaaatccgagaagctggtcagccttcaggacatgttcgaaaagcaggcagttcttacgccagaacgtatcgctctcatgtgtgatgacattcaagtcaactatcgaaagctcaatgaagaggcaaaccgcctcgcgcgtctgttgatcgaaaaagggattggtccggagcaatttgtcgctttggcgctgccgcgttcccctgagatggtggcttcaatgcttggtgtgctcaagactggtgcggcgtatctcccccttgatccggagtttccagccgaccgcatttcttacatgctggaggatgcgaaaccttcatgcatcataacgactgaggaaatagcagccagtctgcctgatgacctggctgtacctgagcttgtgcttgatcaggctgttacacaggagattataaaacgctattcgccggaaaatcaggatgtatcggtttcgcttgaccatcctgcgtatatcatctatacctcaggatcaacaggaagaccgaagggagtcgttgtgacacagaaaagcttaagcaattttctgctgtctatgcaggaggcattttctctaggagaagaagacaggctgttggctgtgacgactgtcgcttttgatatttcagcattggagttatatcttccgctgattagcggagcgcaaatcgtgatcgcaaagaaagaaacgatccgtgagccgcaggcattagctcaaatgattgaaaatttcgatattaacattatgcaggcgacaccgacactgtggcacgctttggtaacgagtgaacctgagaaacttcgggggcttagagtgcttgtaggaggcgaggcgctgccgagcggtcttttgcaggaacttcaagaccttcattgttcagtcacgaacttatacggtcccactgaaacaacgatttggtctgccgcagcttttcttgaagaagggctgaagggcgttcctccgattgggaaaccgatttggaacacgcaggtgtatgtgcttgataatggattgcagccggtgccgccgggcgttgtcggagagctttatattgcaggaaccggcttggccagaggttatttccatcgtcctgatttaacggcggagcgcttcgttgcagatccatacggaccgccgggaactcggatgtatcggaccggagaccaggcccgctggcgcgccgatgggtctttggattatatcgggcgggcggatcatcaaatcaaaattcgcggattccgaattgaacttggagaaattgatgccgtgcttgccaatcacccgcacattgaacaggccgcggttgtcgtacgggaagatcagccgggagacaaacgattggcggcttatgtagtcgctgatgctgctattgatactgcagagcttcgtcgttatatgggggctagtcttcctgattatatggtaccgtcggcgtttgtggagatggacgagctgccgttaacacctaatggcaagcttgaccggaaagcactgccggcaccagacttcagcacatctgtcagtgatcgggccccgcggactcctcaggaagagatattgtgtgacttgtttgcagaggttctcggtttggcacgcgtcggtatcgatgacttctttgcgctcggagggcattccttgaaggccatgaccgccgcgtcccgcatcaagaaagagctcgggattgatcttccagtgaagcttttgtttgaagcgccgacgatcgccggcatttcagcgtatttgaaaaacgggggctctgatggcttgcaggatgtaacgataatgaatcaggatcaggagcagatcattttcgcatttccgccggttctgggctatggccttatgtaccaaaatctgtccagccgcttgccgtcatacaagctatgcgcctttgattttattgaggaggaagaccggcttgaccgctatgcggatttgatccagaagctgcagccggaagggcctttaacattgtttggatattcagcgggatgcagcctggcgtttgaagctgcgaaaaagcttgaggaacaaggccgtattgttcagcggatcatcatggtggattcctataaaaaacaaggtgtcagtgatctggacggacgcacggttgaaagtgatgtcgaagcgttgatgaatgtcaatcgggacaatgaagcgctcaacagcgaagccgtcaaacacggcctcaagcaaaaaacacatgccttttactcatactacgtcaacctgatcagcacaggccaggtgaaagcagatattgatctgttgacttccggcgctgattttgacatgccggaatggcttgcatcatgggaagaagctacaacaggtgtttaccgtgtgaaaagaggcttcggaacacacgcagaaatgctgcagggcgaaacgctagataggaatgcggagattttgctcgaatttcttaatacacaaaccgtaacggtttcataaatgaagtgatgaaaggaggagacagccaatgagccaactcttcaaatcatttgatgcgtcggaaaaaacacagctcatctgttttccgtttgccggcggctattcggcgtcgtttcgccctctccatgcttttttgcagggggagtgcgagatgctcgctgccgagccgccgggacacggcacgaatcaaacgtcagccattgaggatctcgaagagctgacggatttgtacaagcaagaactgaaccttcgccctgatcggccgtttgtgctgttcggacacagtatgggcggaatgatcaccttcaggctggcgcaaaagcttgagcgtgaaggcatctttccgcaggcggttatcatttctgcaatccagccgcctcatattcagcggaagaaagtgtcccacctgcctgatgatcagtttctcgatcatattatccaattaggcggaatgcccgcagagcttgttgaaaataaggaggtcatgtcctttttcctgccttctttccgatcagattaccgggctcttgaacaatttgagctttacgatctggcccagatccagtcgcctgttcatgtctttaacgggcttgatgataaaaaatgcatacgagatgcggaagggtggaagaagtgggcaaaagacatcacattccatcaatttgacggcgggcacatgttcctgctgtcacaaacggaagaagtcgcagaacggatttttgcgatcttgaatcagcatccgatcattcaaccgtgaagccgccccgcagggcgctccgcaggccgcttccggaccactccggaagcggccgtgcggtcggaggatcc

SEQ ID NO: 49 - DNA, 1560 bp, Bacillus subtilis
gagaagcagatgattctcaaaacatggaacgccacaggaaaaacgtatccatatataacttttcatgagttgtttgagcagcaggcgaaaaagacgcctgatagagcggctgtcagctatgaaggtcaaacattgacgtatcgggagcttgatgagaaaagcacacagctggccatttatttgcaggcgcatggagtgggtcctgaccgtctggcggggatctatgtggatcgatcgctggacatgctagtgggtttattagcgatcctcaaggctgggggagcgtatgtgccgctagacccgtcctatccggctgaacgattagaatacatgcttgaggacagtgaagttttcattacactgacgacatcggaattagtaaatacgttgagttggaacggtgtcacaacagcccttttagatcaagattgggatgaaattgctcaaacagcctctgatcgaaaagtgcttacacgcactgtcacgccagagaacttggcatatgtcatttatacatccggcagcacaggaaagccaaaaggtgtcatgataccacataaagctttgacaaactttctcgtttcgatgggggaaacaccaggtcttacggcagaggataaaatgcttgctgtcacaacctactgttttgatattgcagctctggaattatttttgcctttaataaagggcgcacactgctatatttgtcaaacggagcatacaaaagacgttgaaaaactgaaacgggacatccgcgcgatcaaaccgacagtgatgcaggcaacccccgctacgtggaagatgctcttttattcaggctgggaaaatgaagagagcgtgaaaattttatgcggtggcgaagcattgcctgagacattaaaacgatatttcttagatacgggcagcgaagcctggaatatgttcgggccaaccgaaacaactatctggtcagcggttcagcgcattaacgttgaatgctctcatgccacgataggaaggccaatcgccaatacacaaatctatattacggattctcagctcgcgccagtgccggcaggtgttccgggtgagctgtgcattgcaggagacggtgtggcgaagggctactacaaaaaggaagaattaacggattcgagattcattgacaacccttttgagcctgggtctaagctttatagaacgggagacatggcccgttggcttacgggagggcgaattgaatatataggccgcatcgataatcaagtaaaaatccgcggattccgtattgaacttggtgatattgaaagcaggcttagtgagcatcccggcattctggaatgcgttgtggtcgcagatatggataacctagctgcctattatacagctaaacatgcaaatgcttctctcacagcgagagagctgcgtcattttgtgaaaaacgctttgcctgcctatatggtgccttcttattttattcagcttgatcatatgccgttaactccgaacggaaagatagatagaaacagccttaagaatatcgatttatcaggggagcagctaaagcaaaggcagacctct

SEQ ID NO: 50 - DNA, 1287 bp, Bacillus subtilis
cctttaacggatgcacaaaaacgaatttggtacacagaaaaattttatcctcacacgagcatttcaaatcttgcggggattggtaagctggtttcagctgatgcgattgattatgtgcttgttgagcaggcgattcaagagtttattcgcagaaatgacgccatgcgccttcggttgcggctagatgaaaacggggagcctgttcaatatattagcgagtatcggcctgttgatataaaacatactgacactactgaagatccgaatgcgatagagtttatttcacaatggagccgggaggaaacgaagaaacctttgccgctatacgattgtgatttgttccgtttttccttgttcaccataaaggaaaatgaagtgtggttttacgcaaatgttcatcacgtgatttctgatggtatctccatgaatattctcgggaatgcgatcatgcacatttatttagaattagccagcggctcagagacaaaagaaggaatctcgcattcatttatcgatcatgttttatctgaacaggaatatgctcaatcgaagcggtttgaaaaggacaaggcgttttggaacaaacaatttgaatcggtgcctgaacttgtttccttgaaacggaatgcatccgcagggggaagtttagatgctgagaggttctctaaagatgtgcctgaagcgcttcatcagcagattctgtcgttttgtgaggcgaataaagtcagtgttctttcggtatttcaatcgctgctcgccgcctatttgtacagggtcagcggccagaatgatgttgtgacgggaacatttatgggcaaccggacaaatgcgaaagagaagcagatgcttggcatgtttgtttctacggttccgcttcggacaaacattgacggcgggcaggcgttttcagaatttgtcaaagaccggatgaaggatctgatgaagacacttcgccaccaaaagtatccgtataatctcctaatcaacgatttgcgtgaaacaaagagctctctgaccaagctgttcacggtttctcttgaatatcaagtgatgcagtggcagaaagaagaggatcttgcctttttgactgagccgattttcagcggcagcggattaaatgatgtctcaattcatgtaaaggatcgatgggatactgggaaactcaccatagattttgattaccgcactgatttattttcacgtgaagaaatcaacatgatttgtgagcgcatgattaccatgctggagaacgcgttaacgcatccagaacatacaattgatgaatta

SEQ ID NO: 51 - DNA, 843 bp, Bacillus subtilis
ttctttgcgctcggagggcattccttgaaggccatgaccgccgcgtcccgcatcaagaaagagctcgggattgatcttccagtgaagcttttgtttgaagcgccgacgatcgccggcatttcagcgtatttgaaaaacgggggctctgatggcttgcaggatgtaacgataatgaatcaggatcaggagcagatcattttcgcatttccgccggttctgggctatggccttatgtaccaaaatctgtccagccgcttgccgtcatacaagctatgcgcctttgattttattgaggaggaagaccggcttgaccgctatgcggatttgatccagaagctgcagccggaagggcctttaacattgtttggatattcagcgggatgcagcctggcgtttgaagctgcgaaaaagcttgaggaacaaggccgtattgttcagcggatcatcatggtggattcctataaaaaacaaggtgtcagtgatctggacggacgcacggttgaaagtgatgtcgaagcgttgatgaatgtcaatcgggacaatgaagcgctcaacagcgaagccgtcaaacacggcctcaagcaaaaaacacatgccttttactcatactacgtcaacctgatcagcacaggccaggtgaaagcagatattgatctgttgacttccggcgctgattttgacatgccggaatggcttgcatcatgggaagaagctacaacaggtgtttaccgtgtgaaaagaggcttcggaacacacgcagaaatgctgcagggcgaaacgctagataggaatgcggagattttgctcgaatttcttaatacacaaaccgtaacggtttcataa

SEQ ID NO: 52 - DNA, 1566 bp, Bacillus subtilis
gagaaagaaaaagtcatttctaaatggaatgagacggcaaaatccgagaagctggtcagccttcaggacatgttcgaaaagcaggcagttcttacgccagaacgtatcgctctcatgtgtgatgacattcaagtcaactatcgaaagctcaatgaagaggcaaaccgcctcgcgcgtctgttgatcgaaaaagggattggtccggagcaatttgtcgctttggcgctgccgcgttcccctgagatggtggcttcaatgcttggtgtgctcaagactggtgcggcgtatctcccccttgatccggagtttccagccgaccgcatttcttacatgctggaggatgcgaaaccttcatgcatcataacgactgaggaaatagcagccagtctgcctgatgacctggctgtacctgagcttgtgcttgatcaggctgttacacaggagattataaaacgctattcgccggaaaatcaggatgtatcggtttcgcttgaccatcctgcgtatatcatctatacctcaggatcaacaggaagaccgaagggagtcgttgtgacacagaaaagcttaagcaattttctgctgtctatgcaggaggcattttctctaggagaagaagacaggctgttggctgtgacgactgtcgcttttgatatttcagcattggagttatatcttccgctgattagcggagcgcaaatcgtgatcgcaaagaaagaaacgatccgtgagccgcaggcattagctcaaatgattgaaaatttcgatattaacattatgcaggcgacaccgacactgtggcacgctttggtaacgagtgaacctgagaaacttcgggggcttagagtgcttgtaggaggcgaggcgctgccgagcggtcttttgcaggaacttcaagaccttcattgttcagtcacgaacttatacggtcccactgaaacaacgatttggtctgccgcagcttttcttgaagaagggctgaagggcgttcctccgattgggaaaccgatttggaacacgcaggtgtatgtgcttgataatggattgcagccggtgccgccgggcgttgtcggagagctttatattgcaggaaccggcttggccagaggttatttccatcgtcctgatttaacggcggagcgcttcgttgcagatccatacggaccgccgggaactcggatgtatcggaccggagaccaggcccgctggcgcgccgatgggtctttggattatatcgggcgggcggatcatcaaatcaaaattcgcggattccgaattgaacttggagaaattgatgccgtgcttgccaatcacccgcacattgaacaggccgcggttgtcgtacgggaagatcagccgggagacaaacgattggcggcttatgtagtcgctgatgctgctattgatactgcagagcttcgtcgttatatgggggctagtcttcctgattatatggtaccgtcggcgtttgtggagatggacgagctgccgttaacacctaatggcaagcttgaccggaaagcactgccggcaccagacttcagcacatctgtcagtgatcgggcc

SEQ ID NO: 53 - protein, 7 aa, Artificial Sequence
  Description of Artificial Sequence: Synthetic peptide
SDAEKQM

SEQ ID NO: 54 - protein, 8 aa, Artificial Sequence
  Description of Artificial Sequence: Synthetic peptide
TLISDAEK

SEQ ID NO: 55 - protein, 10 aa, Artificial Sequence
  Description of Artificial Sequence: Synthetic peptide
IEWDDDFFAL

SEQ ID NO: 56 - protein, 12 aa, Artificial Sequence
  Description of Artificial Sequence: Synthetic peptide
RVGIDDDFFALG

SEQ ID NO: 57 - protein, 13 aa, Artificial Sequence
  Description of Artificial Sequence: Synthetic peptide
WQEVLNVEKAGIF

SEQ ID NO: 58 - protein, 519 aa, Artificial Sequence
  Description of Artificial Sequence: Synthetic polypeptide
KLLARAGGKSVSYRKDMTIPELFQEKAELLSDHPAVVFEDRTLSYRTLHEQSARIANVLKQKGVGPDSPVAVLIERSERMITAIMGILKAGGAYVPIDPGFPAERIQYILEDCGADFILTESKVAAPEADAELIDLDQAIEEGAEESLNADVNARNLAYIIYTSGTTGRPKGVMIEHRQVHHLVESLQQTIYQSGSQTLRMALLAPFHFDASVKQIFASLLLGQTLYIVPKKTVTNGAALTAYYRKNSIEATDGTPAHLQMLAAAGDFEGLKLKHMLIGGEGLSSVVADKLLKLFKEAGTAPRLTNVYGPTETCVDASVHPVIPENAVQSAYVPIGKALGNNRLYILDQKGRLQPEGVAGELYIAGDGVGRGYLHLPELTEEKFLQDPFVPGDRMYRTGDVVRWLPDGTIEYLGREDDQVKVRGYRIELGEIEAVIQQAPDVAKAVVLARPDEQGNLEVCAYVVQKPGSEFAPAGLREHAARQLPDYMVPAYFTEVTEIPLTPSGKVDRRKLFALEVKA

SEQ ID NO: 59 - protein, 514 aa, Artificial Sequence
  Description of Artificial Sequence: Synthetic polypeptide
SQIQQFNPGRTPYPKDKTIVQLFEEQAANTPDHTALQYEGESLTYRELNERANRLARGILSLGAGEGRTAAVLCERSMDMIVSILAVLKSGSAYVPIDPEHPIQRMQHFFRDSGAKVLLTQRKLKALAEEAEFKGVIVLADEEESYHADARNLALPLDSAAMANLTYTSGTTGTPKGNIVTHANILRTVKETNYLSITEQDTILGLSNYVFDAFMFDMFGSLLNGAKLVLIPKETVLDMARLSRVIERENISILMITTALFHLLVDLNPACLSTLRKIMFGGERASVEHVRKALQTVGKGKLLHMYGPSESTVFATYHPVDELEEHTLSVPIGKPVSNTEVYILDRTGHVQPAGIAGELCVSGEGLVKGYYNRPELTEEKFVPHPFTSGERMYKTGDLARWLPNGDIEFIGRIDHQVKIRGQRIELGEIEHQLQTHDRVQESVVLAVDQGAGDKLLCAYYVGEGDISSQEMREHAAKDLPAYMVPAVFIQMDELPLTGNGKIDRRALPIPDANV

SEQ ID NO: 60 - protein, 503 aa, Artificial Sequence
  Description of Artificial Sequence: Synthetic polypeptide
ALLEAWKGKALPVPTDKTVHQLFEETAQRHKDRPAVTYNGQSWTYGELNAKANRLARILMDCGISPDDRVGVLTKPSLEMSAAVLGVLKAGAAFVPIDPDYPDQRIEYILQDSGAKLLLKQEGISVPDSYTGDVILLDGSRTILSLPLDENDEENPETAVTAENLAYMIYTSGTTGQPKGVMVEHHALVNLCFWHHDAFSMTAEDRSAKYAGFGFDASIWEMFPTWTIGAELHVIEEAIRLDIVRLNDYFETNGVTITFLPTQLAEQFMELENTSLRVLLTGGDKLKRAVKKPYTLVNNYGPTENTVVATSAEIHPEEGSLSIGRAIANTRVYILGEGNQVQPEGVAGELCVAGRGLARGYLNREDETAKRFVADPFVPGERMYRTGDLVKWTGGGIEYIGRIDQQVKVRGYRIELSEIEVQLAQLSEVQDAAVTAVKDKGGNTAIAAYVTPESADIEALKSALKETLPDYMIPAFWVTLNELPVTANGKVDRKALPEPDIEA

SEQ ID NO: 61 - protein, 510 aa, Artificial Sequence
  Description of Artificial Sequence: Synthetic polypeptide
QIVEVFNSTKAELPEGMAVHQVFEEQAKRTPASTAVVYEGTKLTYRELNAAANRLARKLVEHGLQKGETAAIMNDRSVETVVGMLAVLKAGAAYVPLDPALPGDRLRFMAEDSSVRMVLIGNSYTGQAHQLQVPVLTLDIGFEESEAADNLNLPSAPSDLAYIMYTSGSTGKPKGVMIEHKSILRLVKNAGYVPVTEEDRMAQTGAVSFDAGTFEVFGALLNGAALYPVKKETLLDAKQFAAFLREQSITTMWLTSPLFNQLAAKDAGMFGTLRHLIIGGDALVPHIVSKVKQASPSLSLWNGYGPTENTTFSTSFLIDREYGGSIPIGKPIGNSTAYIMDEQQCLQPIGAPGELCVGGIGVARGYVNLPELTEKQFLEDPFRPGERIYRTGDLARWLPDGNIEFLGRIDNQVKVRGFRIELGEIETKLNMAEHVTEAAVIIRKNKADENEICAYFTADREVAVSELRKTLSQSLPDYMVPAHLIQMDSLPLTPNGKINKKELPAPQSEA

SEQ ID NO: 62 - protein, 515 aa, Artificial Sequence
  Description of Artificial Sequence: Synthetic polypeptide
ALLEERHMTQITEATFAALFEKQAQQTPDHSAVKAGGNLLTYRELDEQANQLAHHLRAQGAGNEDIVAIVMDRSAEVMVSILGVMKAGAAFLPIDPDTPEERIRYSLEDSGAKFAVVNERNMTAIGQYEGIIVSLDDGKWRNESKERPSSISGSRNLAYVIYTSGTTGKPKGVQIEHRNLTNYVSWFSEEAGLTENDKTVLLSSYAFDLGYTSMFPVLLGGGELHIVQKETYTAPDEIAHYIKEHGITYIKLTPSLFHTIVNTASFAKDANFESLRLIVLGGEKIIPTDVIAFRKMYGHTEFINHYGPTEATIGAIAGRVDLYEPDAFAKRPTIGRPIANAGALVLNEALKLVPPGASGQLYITGQGLARGYLNRPQLTAERFVENPYSPGSLMYKTGDVVRRLSDGTLAFIGRADDQVKIRGYRIEPKEIETVMLSLSGIQEAVVLAVSEGGLQELCAYYTSDQDIEKAELRYQLSLTLPSHMIPAFFVQVDAIPLTANGKTDRNALPKPNAAQ

SEQ ID NO: 63 - protein, 503 aa, Artificial Sequence
  Description of Artificial Sequence: Synthetic polypeptide
ALLEAWKGKALPVPTDKTVHQLFEETVQRHKDRPAVTYNGQSWTYGELNAKANRLARILMDCGISPDDRVGVLTKPSLEMSAAVLGVLKAGAAFVPIDPDYPDQRIEYILQDSGAKLLLKQEGISVPDSYTGDVILLDGSRTILSLPLDENDEGNPETAVTAENLAYMIYTSGTTGQPKGVMVEHHALVNLCFWHHDAFSMTAEDRSAKYAGFGFDASIWEMFPTWTIGAELHVIDEAIRLDIVRLNDYFETNGVTITFLPTQLAEQFMELENTSLRVLLTGGDKLKRAVKKPYTLVNNYGPTENTVVATSAEIHPEEGSLSIGRAIANTRVYILGEGNQVQPEGVAGELCVAGRGLARGYLNREDETAKRFVADPFVPGERMYRTGDLVKWVNGGIEYIGRIDQQVKVRGYRIELSEIEVQLAQLSEVQDAAVTAVKDKGGNTAIAAYVTPETADIEALKSTLKETLPDYMIPAFWVTLNELPVTANGKVDRKALPEPDIEA

SEQ ID NO: 64 - protein, 513 aa, Artificial Sequence
  Description of Artificial Sequence: Synthetic polypeptide
FLLTGLNPPAQAHETKPLTYWFKEAVNANPDAPALTYSGQTLSYRELDEEANRIARRLQKHGAGKGSVVALYTKRSLELVIGILGVLKAGAAYLPVDPKLPEDRISYMLADSAAACLLTHQEMKEQAAELPYTGTTLFIDDQTRFEEQASDPATAIDPNDPAYIMYTSGTTGKPKGNITTHANIQGLVKHVDYMAFSDQDTFLSVSNYAFDAFTFDFYASMLNAARLIIADEHTLLDTERLTDLILQENVNVMFATTALFNLLTDAGEDWMKGLRCILFGGERASVPHVRKALRIMGPGKLINCYGPTEGTVFATAHVVHDLPDSISSLPIGKPISNASVYILNEQSQLQPFGAVGELCISGMGVSKGYVNRADLTKEKFIENPFKPGETLYRTGDLARWLPDGTIEYAGRIDDQVKIRGHRIELEEIEKQLQEYPGVKDAVVVADRHESGDASINAYLVNRTQLSAEDVKAHLKKQLPAYMVPQTFTFLDELPLTTNGKVNKRLLPKPDQDQ

SEQ ID NO: 65 - protein, 513 aa, Artificial Sequence
  Description of Artificial Sequence: Synthetic polypeptide
KVISKWNETAKSEKLVSLQDMFEKQAVLTPERIALMCDDIQVNYRKLNEEANRLARLLIEKGIGPEQFVALALPRSPEMVASMLGVLKTGAAYLPLDPEFPADRISYMLEDAKPSCIITTEEIAASLPDDLAVPELVLDQAVTQEIIKRYSPENQDVSVSLDHPAYIIYTSGSTGRPKGVVVTQKSLSNFLLSMQEAFSLGEEDRLLAVTTVAFDISALELYLPLISGAQIVIAKKETIREPQALAQMIENFDINIMQATPTLWHALVTSEPEKLRGLRVLVGGEALPSGLLQELQDLHCSVTNLYGPTETTIWSAAAFLEEGLKGVPPIGKPIWNTQVYVLDNGLQPVPPGVVGELYIAGTGLARGYFHRPDLTAERFVADPYGPPGTRMYRTGDQARWRADGSLDYIGRADHQIKIRGFRIELGEIDAVLANHPHIEQAAVVVREDQPGDKRLAAYVVADAAIDTAELRRYMGASLPDYMVPSAFVEMDELPLTPNGKLDRKALPAPDFST

SEQ ID NO: 66 - protein, 516 aa, Artificial Sequence
  Description of Artificial Sequence: Synthetic polypeptide
ACLPEQFEKQAALRPDAIAVVYENQELSYAELNERANRLARMMISEGVGPEQFVALALPRSLEMAVGLLAVLKAGAAYLPLDPDYPADRIAFMLKDAQPAFIMTNTKAANHIPPVENVPKIVLDDPELAEKLNTYPAGNPKNKDRTQPLSPLNTAYVIYTSGSTGVPKGVMIPHQNVTRLFAATEHWFRFSSGDIWTMFHSYAFDFSVWEIWGPLLHGGRLVIVPHHVSRSPEAFLRLLVKEGVTVLNQTPSAFYQFMQAEREQPDLGQALSLRYVIFGGEALELSRLEDWYNRHPENRPQLINMYGITETTVHVSYIELDRSMAALRANSLIGCGIPDLGVYVLDERLQPVPPGVAGELYVSGAGLARGYLGRPGLTSERFIADPFGPPGTRMYRTGDVARLRADGSLDYVGRADHQVKIRGFRIELGEIEAALVQHPQLEDAAVIVREDQPGDKRLAAYVIPSEETFDTAELRRYAAERLPDYMVPAAFVTMKELPLTPNGKLDRKALPAPDFA

SEQ ID NO: 67 - protein, 431 aa, Artificial Sequence
  Description of Artificial Sequence: Synthetic polypeptide
LTDAQKRIWYTEKFYPHTSISNLAGIGKLVSADAIDYVLVEQAIQEFIRRNDAMRLRLRLDENGEPVQYISEYRPVDIKHTDTTEDPNAIEFISQWSREETKKPLPLYDCDLFRFSLFTIKENEVWFYANVHHVISDGISMNILGNAIMHIYLELASGSETKEGISHSFIDHVLSEQEYAQSKRFEKDKAFWNKQFESVPELVSLKRNASAGGSLDAERFSKDVPEALHQQILSFCEANKVSVLSVFQSLLAAYLYRVSGQNDVVTGTFMGNRTNAKEKQMLGMFVSTVPLRTNIDGGQAFSEFVKDRMKDLMKTLRHQKYPYNLLINDLRETKSSLTKLFTVSLEYQVMQWQKEEDLAFLTEPIFSGSGLNDVSIHVKDRWDTGKLTIDFDYRTDLFSREEINMICERMITMLENALTHPEHTIDELTLI

SEQ ID NO: 68 - protein, 364 aa, Artificial Sequence
  Description of Artificial Sequence: Synthetic polypeptide
FVLENSTPRQKIHDSVDFNIEMIERGGRSDEAIMASFVRTFDLAKAPLFRIGLLGLEENRHMLLFDMHHLISDGVSIGIMLEELARIYKGEQLPDLRLQYKDYAVWQSRQAAEGYKKDQAYWKEVFAGELPVLQLLSDYPRPPVQSFEGDRVSIKLDAGVKDRLNRLAEQNGATLYMVMLSAYYTLLSKYTGQDDIIVGTPSAGRNHSDTEGIIGMFVNTLAIRSEVKQNETFTQLISRVRKRVLDAFSHQDYPFEWLVEDLNIPRDVSRHPLFDTMFSLQNATEGIPAVGDLSLSVQETNFKIAKFDLTVQARETDEGIEIDVDYSTKLFKQSTADRLLTHFARLLEDAAADPEKPISEYKLL

SEQ ID NO: 69 - protein, 420 aa, Artificial Sequence
  Description of Artificial Sequence: Synthetic polypeptide
VSSPQKRMYVLQQLEDAQTSYNMPAVLRLTGELDVERLNSVMQQLMQRHEALRTTFEIKDGETVQRIWEEAECEIAYFEAPEEETERIVSEFIKPFKIDQLPLFRIGLIKHSDTEHVLLFDMHHIISDGASVGVLIEELSKLYDGETLEPLRIQYKDYAVWQQQFIQSELYKKQEEHWLKELDGELPVLTLPTDYSRPAVQTFEGDRIAFSLEAGKADALRRLAKETDSTLYMVLLASYSAFLSKISGQDDIIVGSPVAGRSQADVSRVIGMFVNTLALRTYPKGEKTFADYLNEVKETALSAFDAQDYPLEDLIGNVQVQRDTSRNPLFDAVFSMQNANIKDLTMKGIQLEPHPFERKTAKFDLTLTADETDGGLTFVLEYNTALFKQETIERWKQYWMELLDAVTGNPNQPLSSLSLV

SEQ ID NO: 70 - protein, 431 aa, Artificial Sequence
  Description of Artificial Sequence: Synthetic polypeptide
LTPMQEGMLYHAMLDPHSSSYFTQLELGIHGAFDLEIFEKSVNELIRSYDILRTVFVHQQLQKPRQVVLAERKTKVHYEDISHADENRQKEHIERYKQDVQRQGFNLAKDILFKVAVFRLAADQLYLVWSNHHIMMDGWSMGVLMKSLFQNYEALRAGRTPANGQGKPYSDYIKWLGKQDNEEAESYWSERLAGFEQPSVLPGRLPVKKDEYVNKEYSFTWDETLVARIQQTANLHQVTGPNLFQAVWGIVLSKYNFTDDVIFGTVVSGRPSEINGIETMAGLFINTIPVRVKVERDAAFADIFTAVQQHAVEAERYDYVPLYEIQKRSALDGNLLNHLVAFENYPLDQELENGSMEDRLGFSIKVESAFEQTSFDFNLIVYPGKTWTVKIKYNGAAFDSAFIERTAEHLTRMMEAAVDQPAAFVREYGLV

SEQ ID NO: 71 - protein, 417 aa, Artificial Sequence
  Description of Artificial Sequence: Synthetic polypeptide
VSPAQRRMYILNQLGQANTSYNVPAVLLLEGEVDKDRLENAIQQLINRHEILRTSFDMIDGEVVQTVHKNISFQLEAAKGREEDAEEIIKAFVQPFELNRAPLVRSKLVQLEEKRHLLLIDMHHIITDGSSTGILIGDLAKIYQGADLELPQIHYKDYAVWHKEQTNYQKDEEYWLDVFKGELPILDLPADFERPAERSFAGERVMFGLDKQITAQIKSLMAETDTTMYMFLLAAFNVLLSKYASQDDIIVGSPTAGRTHPDLQGVPGMFVNTVALRTAPAGDKTFAQFLEEVKTASLQAFEHQSYPLEELIEKLPLTRDTSRSPLFSVMFNMQNMEIPSLRLGDLKISSYSMLHHVAKFDLSLEAVEREEDIGLSFDYATALFKDETIRRWSRHFVNIIKAAAANPNVRLSDVDLL

SEQ ID NO: 72 - protein, 419 aa, Artificial Sequence
  Description of Artificial Sequence: Synthetic polypeptide
LSSAQKRMYVLNQLDRQTISYNMPSVLLMEGELDISRLRDSLNQLVNRHESLRTSFMEANGEPVQRIIEKAEVDLHVFEAKEDEADQKIKEFIRPFDLNDAPLIRAALLRIEAKKHLLLLDMHHIIADGVSRGIFVKELALLYKGEQLPEPTLHYKDFAVWQNEAEQKERMKEHEAYWMSVLSGELPELDLPLDYARPPVQSFKGDTIRFRTGSETAKAVEKLLAETGTTLHMVLHAVFHVFLSKISGQRDIVIGSVTAGRTNADVQDMPGMFVNTLALRMEAKEQQTFAELLELAKQTNLSALEHQEYPFEDLVNQLDLPRDMSRNPLFNVMVTTENPDKEQLTLQNLSISPYEAHQGTSKFDLTLGGFTDENGIGLQLEYATDLFAKETAEKWSEYVLRLLKAVADNPNQPLSSLLL

SEQ ID NO: 73 - protein, 427 aa, Artificial Sequence
  Description of Artificial Sequence: Synthetic polypeptide
LSPMQEGMLFHAILNPGQSFYLEQITMKVKGSLNIKCLEESMNVIMDRYDVFRTVFIHEKVKRPVQVVLKKRQFHIEEIDLTHLTGSEQTAKINEYKEQDKIRGFDLTRDIPMRAAIFKKAEESFEWVWSYHHIILDGWCFGIVVQDLFKVYNALREQKPYSLPPVKPYKDYIKWLEKQDKQASLRYWREYLEGFEGQTTFAEQRKKQKDGYEPKELLFSLSEAETKAFTELAKSQHTTLSTALQAVWSVLISRYQQSGDLAFGTVVSGRPAEIKGVEHMVGLFINVVPRRVKLSEGITFNGLLKRLQEQSLQSEPHQYVPLYDIQSQADQPKLIDHIIVFENYPLQDAKNEESSENGFDMVDVHVFEKSNYDLNLMASPGDEMLIKLAYNENVFDEAFILRLKSQLLTAIQQLIQNPDQPVSTINL

SEQ ID NO: 74 - protein, 433 aa, Artificial Sequence
  Description of Artificial Sequence: Synthetic polypeptide
SEVQKGLWTLQKMSPEKSAYHVPLCFKFSSGLHHETFQQAFGLVLNQHPILKHVIQEKDGVPFLKNEPALSIEIKTENISSLKESDIPAFLRKKVKEPYVKENSPLVRVMSFSRSEQEHFLLVVIHHLIFDGVSSVTFIRSLFDTYQLLLKGQQPEKAVSPAIYHDFAAWEKNMLAGKDGVKHRTYWQKQLSGTLPNLQLPNVSASSVDSQFREDTYTRRLSSGFMNQVRTFAKEHSVNVTTVFLSCYMMLLGRYTGQKEQIVGMPAMVRPEERFDDAIGHFLNMLPIRSELNPADTFSSFISKLQLTILDGLDHAAYPFPKMVRDLNIPRSQAGSPVFQTAFFYQNFLQSGSYQSLLSRYADFFSVDFVEYIHQEGEYELVFELWETEEKMELNIKYNTGLFDAASISAMFDHFVYVTEQAMLNPSQPLKEY

SEQ ID NO: 75 - protein, 426 aa, Artificial Sequence
  Description of Artificial Sequence: Synthetic polypeptide
LTGAQTGIWFAQQLDPDNPIYNTAEYIEINGPVNIALFEEALRHVIKEAESLHVRFGENMDGPWQMINPSPDVQLHVIDVSSEPDPEKTALNWMKADLAKPVDLGYAPLFNEALFIAGPDRFFWYQRIHHIAIDGFGFSLIAQRVASTYTALIKGQTAKSRSFGSLQAILEEDTDYRGSEQYEKDRQFWLDRFADAPEVVSLADRAPRTSNSFLRHTAYLPPSDVNALKEAARYFSGSWHEVMIAVSAVYVHRMTGSEDVVLGLPMMGRIGSASLNVPAMVMNLLPLRLTVSSSMSFSELIQQISREIRSIRRHHKYRHEELRRDLKLIGENHRLFGPQINLMPFDYGLDFAGVRGTTHNLSAGPVDDLSINVYDRTDGSGLRIDVDANPEVYSESDIKLHQQRILQLLQTASAGEDMLIGQMELL

SEQ ID NO: 76 - protein, 446 aa, Artificial Sequence
  Description of Artificial Sequence: Synthetic polypeptide
LSFAQRRLWFLHCLEGPSPTYNIPVAVRLSGELDQGLLKAALYDLVCRHESLRTIFPESQGTSYQHILDADRACPELHVTEIAEKELSDRLAEAVRYSFDLAAEPAFRAELFVIGPDEYVLLLLVHHIVGDGWSLTPLTRDLGTAYAARCHGRSPEWAPLAVQYADYALWQQELLGNEDDPNSLIAGQLAFWKETLKNLPDQLELPTDYSRPAEPSHDGDTIHFRIEPEFHKRLQELARANRVSLFMVLQSGLAALLTRLGAGTDIPIGSPIAGRNDDALGDLVGLFINTLVLRTDTSGDPSFRELLDRVREVNLAAYDNQDLPFERLVEVLNPARSRATHPLFQIMLAFQNTPDAELHLPDMESSLRINSVGSAKFDLTLEISEDRLADGTPNGMEGLLEYSTDLFKRETAQALADRLMRLLEAAESDPDEQIGNLDILAPEEHS

SEQ ID NO: 77 - protein, 65 aa, Artificial Sequence
  Description of Artificial Sequence: Synthetic polypeptide
DTVFTIWQEVLKTSDIEWDDGFFDVGGDSLLAVTVADRIKHELSCEFSVTDLFEYSTIKNISQYI

SEQ ID NO: 78 - protein, 65 aa, Artificial Sequence
  Description of Artificial Sequence: Synthetic polypeptide
EILCDLFMEVLHLPRVGIDDRFFDLGGHSLLAVQLMSRIREALGVELSIGNLFEAPTVAGLAERL

SEQ ID NO: 79 - protein, 65 aa, Artificial Sequence
  Description of Artificial Sequence: Synthetic polypeptide
EILCDLFAEVLGLARVGIDDSFFELGGHSLLAARLMSRIREVMGAELGIAKLFDEPTVAGLAAHL

SEQ ID NO: 80 - protein, 65 aa, Artificial Sequence
  Description of Artificial Sequence: Synthetic polypeptide
ETIAQIWSEVLGRKQIGIHDDFFALGGHSLKAMTAASRIKKELGIDLPVKLLFEAPTIAGISAYL

SEQ ID NO: 81 - protein, 64 aa, Artificial Sequence
  Description of Artificial Sequence: Synthetic polypeptide
ELLAGIWQDVLGMSEVGVTDNFFSLGGDSIKGIQMASRLNQHGWKLEMKDLFQHPTIEELTQYV

SEQ ID NO: 82 - protein, 64 aa, Artificial Sequence
  Description of Artificial Sequence: Synthetic polypeptide
ESLCRIWQKTLGIEAIGIDDNFFDLGGHSLKGMMLIANIQAELEKSVPLKALFEQPTVRQLAAY

SEQ ID NO: 83 - protein, 64 aa, Artificial Sequence
  Description of Artificial Sequence: Synthetic polypeptide
KKLAEIWEGILGVKAGVTDNFFMIGGHSLKAMMMTAKIQEHFHKEVPIKVLFEKPTIQELALYL

SEQ ID NO: 84 - protein, 64 aa, Artificial Sequence; identical to SEQ ID NO: 81
  Description of Artificial Sequence: Synthetic polypeptide

SEQ ID NO: 85 - protein, 65 aa, Artificial Sequence
  Description of Artificial Sequence: Synthetic polypeptide
QKVADIWAQVLQAEQVGAYDHFFDIGGHSLAGMKMLALVHQELGVELSLKDLFQSPTVEGLAQVI

SEQ ID NO: 86 - protein, 63 aa, Artificial Sequence
  Description of Artificial Sequence: Synthetic polypeptide
KAIAAIWQDVLNVEKAGIFDNFFETGGHSLKAMTLLTKIHKETGIEIPLQFLFEHPTITALAE

SEQ ID NO: 87 - protein, 445 aa, Artificial Sequence
  Description of Artificial Sequence: Synthetic polypeptide
LTPIQRWFFEKNFTNKHHWNQSVMLHAKKGFDPERVEKTLQALIEHHDALRMVYREGQEDVIQYNRGLEAASAQLEVIQIEGQAADYEDRIEREAERLQSSIDLQEGGLLKAGLFQAEDGDHLLLAIHHLVVDGVSWRILLEDFAAVYTQLEQGNEPVLPQKTHSFAEYAERLQDFANSKAFLKEKEYWRQLEEQAVAAKLPKDRESGDQRMKHTKTIEFSLTAEETEQLTTKVHEAYHTEMNDILLTAFGLAMKEWTGQDRVSVHLEGHGREEIIEDLTISRTVGWFTSMYPMVLDMKHADDLGYQLKQMKEDIRHVPNKGVGYGILRYLTAPEHKEDVAFSIQPDVSFNYLGQFDEMSDAGLFTRSELPSGQSLSPETEKPNALDVVGYIENGKLTMSLAYHSLEFHEKTVQTFSDSFKAHLLRIIEHCLSQDGTELTPSDLG

SEQ ID NO: 88 - protein, 233 aa, Artificial Sequence
  Description of Artificial Sequence: Synthetic polypeptide
PPLFCVHPAGGLSWCYAGLMTNIGTDYPIYGLQARGIGQREELPKTLDDMAADYIKQIRTVQPKGPYHLLGWSLGGNVVQAMATQLQNQGEEVSLLVMLDAYPNHFLPIKEAPDDEEALIALLALGGYDPDSLGEKPLDFEAAIEILRRDGSALASLDETVILNLKNTYVNSVGILGSYKPKTFRGNVLFFRSTIIPEWFDPIEPDSWKPYINGQIEQIDIDCRHKDLCQPEP

SEQ ID NO: 89 - protein, 10 aa, Streptomyces roseosporus
DILQVGMIWK

SEQ ID NO: 90 - protein, 520 aa, Bacillus amyloliquefaciens
EEHMILKTWNETSREYPDACFHELFERQAAETPDACAVVYEQQQLTYRELDEKSTKLALYLQAHGAGPDDLIGIYTDRSLHMAVGLLGILKAGGAYVPLDPSYPADRLEYMIADSRISMCLTTADLEHSLNWGGVQTTAIDRDWSHIESTAAERTSLKRLVTPDDLAYVIYTSGSTGKPKGVMIPHRALTNFLISMANEPGLSSEDKLLAVTTYCFDIAALELYLPLIKGAECNICKTEVTKDARKLKELIQEYKPTIMQATPFTWKMLFHSGWSNEENVKILCGGEALSEQLKQQFLDTKSEAWNMFGPTETTIWSAVQRITENESALTIGRPIANTRVYIMDSGLNPVLEGVPGELCIAGDGLARGYFNKPELTDKAFVSHRLELGSKLYKTGDMARFLPGGRIEYMGRMDTQVKIRGYRIEPGDIESRLNAHPAVQESVVVVNNHSGNEKLCAFYIRKNGEPLPSAKELRKHMKQALPAYMAPASFVRLEELPLTPNGKVDRKLLAARDLTEKQPDT

SEQ ID NO: 91 - protein, 4982 aa, Bacillus amyloliquefaciens
MKSDMKASGLLKPSVSYGKSLRLSADQPMTIPEVLHKTAAAAGDQKGITYIQPDGTKVYQTYSSLKKIALSIVKGLRQSGVKAQDEVILQLSDNSQLIPAFWGCVFLGAIPVPLAAAPAYTEMNSGTQKLKDAWTLLNQPYVITSRDVLPEMTEWAEEQGLSGFCALAAEDLSAHEMDTDCHHPRPEDLAMLLLTSGSTGTPKAVMLSHENIVCMVKGNIQMQGYTSEDVTFNWMPFDHVGGIGMLHLRDVYLGCEEINIPSESILMDPLKWLDLIDHYRASVTWAPNFAFGLLADFAEEIQTRKWDLSSMRYMLNGGEAAVAKVGRRIMELLEPHGLPANAIRPAWGMSETSSGVIFSDEFTLENTNDDDRFVEIGLPIPGFNMRITDDRNQVVEEGEIGRFQVSGLTVTSGYYERPDLNESVFTEDGWFETGDLGFLREGRLTITGRTKDAIIINGVNYYSHAIESAVEELPEIETSYTAACAVRPNQSTTDELAIFFVTSVPLDENRMTKLLHHIHQHVTQRIGVTPDYLLPVAKEDIPKTAIGKIQRTQLKHSFEQGQFDSLHNNRQEGGNSDTASAEKEIERDFIRFLKEELSIAEELVDPNTPFQSLGVNSIKMMKLARSIEKTYHIRLTARELHKNPTIGALAAYTAEKAANMSAEHHPQKAEPPAERERRQTAPALSEVQKGLWTLQKMSPETTAYHVSLCFRFTSGIDKEKLKQAFQLVLKQHPMLKSAVNETDGGFYFIEAADPFVFSEEDISDVNETQISALIRKKVKEPFVKEGGPLLRVQLLSKSAEEHYLLTVIHHIVFDGISSITFIHSLLDHYQALLEGKEEFTAAAPGIHPDFAAWEKRYLAGDESKAARAYWMKQLEGDLPDLQLPPMRTDSSVPEFTEDTLTRRLPERLLNNITAFAASRSIHLSTVMLSCYMVLLSKYTDKEDIVTGMPAMVRPEERFDGVVGHFLNMLPIRSRAGRKETFADFVQKVQDAVLDGLDHSFYPFPKMVRDVHAKPLQNGSPVFSNAFFYQNFLQHSSYQSMLDEYKEFSCEFVKDIHQEGEYDLVFEMWEEASGMDLTIKYSTELFDEAGAARLFSQFVQAAEALTANPDTPLENVSLMTKREEHMILKTWNETSREYPDACFHELFERQAAETPDACAVVYEQQQLTYRELDEKSTKLALYLQAHGAGPDDLIGIYTDRSLHMAVGLLGILKAGGAYVPLDPSYPADRLEYMIADSRISMCLTTADLEHSLNWGGVQTTAIDRDWSHIESTAAERTSLKRLVTPDDLAYVIYTSGSTGKPKGVMIPHRALTNFLISMANEPGLSSEDKLLAVTTYCFDIAALELYLPLIKGAECNICKTEVTKDARKLKELIQEYKPTIMQATPFTWKMLFHSGWSNEENVKILCGGEALSEQLKQQFLDTKSEAWNMFGPTETTIWSAVQRITENESALTIGRPIANTRVYIMDSGLNPVLEGVPGELCIAGDGLARGYFNKPELTDKAFVSHRLELGSKLYKTGDMARFLPGGRIEYMGRMDTQVKIRGYRIEPGDIESRLNAHPAVQESVVVVNNHSGNEKLCAFYIRKNGEPLPSAKELRKHMKQALPAYMAPASFVRLEELPLTPNGKVDRKLLAARDLTEKQPDTQTFSSSHIQQAVLAIWQDVLKSKDIELDDRFFDAGGDSLLAVTVTDRMTQELDCEFSVTELFEYATVKDISRYITEQKPKEAFLAPVPQKKVNAEDREHPAGEFPDYYEDSLAVIGISCEFPGAKDHYEFWNNIKEGKESITFFSKEELRRSGISEELADHPGFVPAKSVLEGKEMFDPGFFGFSPKDAEYMDPQLRMLLLHSWKAIEDAGYISKEIPETSVYMSASTNSYRSLLPEETTAQLETPDGYVSWVLAQSGTIPTMISHKLGLKGPSYFVHANCSSSLIGLHSAFQSLQSGEAKYALVGGATLHTESSAGYVHQPGLNFSSDGHIKAFDADADGMIGGEGAGAVLLKKASDAVKDGDHIYALLRGIGVNNDGADKVGFYAPSVKGQAEVIQKVIDQTGIHPETIAYVEAHGTGTKLGDPIELSALQSVYGRYTDKKQYCGIGSVKTNLGHLDTAAGMAGCIKVVMSLYHQEIAPSINYKEPNPNLHLEDSPFFVAEEKKELTRENRAHRMALSSFGLGGTNTHAIFEQYPDASEAADAAGPFIIPLSARKKDRLKEYAKQLLAFLERKTDTDLADLAYTFQVGREAMEERAAFITSGTAELKRQLADFINDKPAVTGCFRGEKQQAKDIAWLSDDDDSAELIEKWLAKGKGPKLCEMWSKGVAINWHKLYKDKHPKRISLPVYPFAKEPYWPKKAEKNTSAAHTGVSVLHPLVQQNTSDLAVQRFSSRFTGSEFFLKDHVVREKAVLPGAAYLEMSYEAVKRALGGLLKDQDRITLHHTIWMKPIVVHEQERQVHIALFPEEDGIISYDIYSVNADGEEVLHSQGRAEIIKAEREPEADLSAIQNRCTADILDPAAFYREGRSRGMFHGKAFQGIKSAFIGEKEVLSDIQLPDSVSHTNGQFTLHPSIIDSAIQTATICIMQEFSGQKLILPFALEYLEVIKACTPTMRAHARFSDGYQTGNSVQKADIDLFDETGALCVKVRGFSTRVLEGDAESAQPPSGSEKVLFAPVWKEAAASEKASVRADEHLIILCEDACRIKDETASGLKDAELLIAEGEGETAAERFQSYAQTIAEHIRRIISEKRQGRILIQTVISADGSQQLFAGLTGLLKTAELEYGKLDCQLIEMESIGEMPAVAQKLKNDSHQPHDKHIRYKGEKRYVKAWEEMHPAGGGIVWKDEGVYLITGGAGSLGLMVAKEIAGRVKHPKIILTGRSNLTEAKQRELAMLQHSGANVVYKKLNAADRRENEAMIKEITAEFGKLNGIIHAAGVIQDRFLLQKTKEEFREVLDPKVIGTAYLDEASKDCNLDFFVLFSSVSGVLGNVGQADYAAGNAFMDAYAAYRQSLTENGLRHGKTVAFNWTLWKDGGMQAGDETERMMKKAFGMVPLQKASGLAAFYEGMAQEKPQLLAAEGHAAKLKQSFLSVSETEKPQVKKIEPVSAVSGDKWHGALIRLVSSILKVGQDEIDIDTELSEYGFDSVSFTVFTNQLNEAYQLKLAPTIFFEHGTIRSLADYLTDEAEAGLPSQPEEKHDADKSLQTLHTALTAMVSGILKVDREDIETDTELSEYGFDSVSFTVFTNQLNEAYQLELAPTIFFEHGTISGLAGYLAKEHPGRFGEKKKESPKKEQPKAQKPKMQRKKRFATVMNASAATQEPRRFDPVAIVGISGRFPGAKDIEEFWRNLKEGKDSITTIPKERWDWQAFDGDPNLEGNKTNIKWGGFIDGIAEFDPLFFGISPREAQYLDPQQRLLLTYAWRAIEDAGCKPESLSGTNTGVFIGTGNTGYKDLFTRAGLAPEGHAATGSMIPSIGPNRLSYLLNLHGPSEPIETACSSSLVAIHRAVSAIENGECDMAIAGGINTILTEEAHISYSKAGMLSKDGKCKTFSKDANGYVRGEGAGILMLKKLSDAERDGNPIYGVIRGTAENHGGRANTLTSPNPKLQADLLVKAYRKAGVDPSTVTYIEAHGTGTELGDPIEINGLKAAFHELAKTNQEPEVSGHRCGIGSVKSNIGHLELAAGVSGVMKVLLQMKHKTLVKSLHCETINPYIQLDDSPFYIVRENQEWTAAKDRNGNAIPRRAGVSSFGIGGVNAHIVIEEYVPKAAAQPEHSPENPAIILLSAKSKEKLFEQAQQLQKAIRQTPYTDQDLAGVAYTLQTGRDEMEERLAILAATMAELETKLEAFTKNEKNIAGLYTGQSHRNKDTFALFTADEDMDIVIDAWIKKGKFAKLAEVWVKGGVFNWNRLYEKGTPRLLSLPSYPFAKDTYWVPENPDKNKVHTEERMKRILTKQWELSPLELREPCARSVAILTGGDTINLAEEIAAHMPNHRIITASDLSGEYDWQAFDGVIDLLGAAKEDSQDMAGIKWLQQLIEHGHKEGMTLLCVTKDLESLNKEANQTTGAKRAGLYRMLAYEYGHLSSRHLDLEGALSDDKLAKQIADEFHARTDDAEVCRRDGLRYRAVLSGAENMNMKGERIDFPDNHVLLITGGTRGIGLLCARHFAEHYGVKKLVLTGRETLPPRSEWTGGLNGVPASVKAKIEAVLDLESKGVQVKVLSVPLADEAGLRQELSQIKQTLGPIGGVIHCAGVTDKETLAFIRKTDEDIQRVLEPKVDGLQALYSVLSEEPLKFFVLFSSVSAAIPALSAGQADYAMANAYMDYFANSYKEQLPIVSIQWPNWKETGMGEVTNKAYKESGLYSITNAEGLQLLDGILLESARGPVLPAVLNPKLWKPERFLRRSRQDQPMSPAMVKPAEKTAYTAENNTQLTRKTEEWLKELFSEELRIDQDQLETDVLFQDYGVDSIILAQLLQRINRNLSASLDPSILYEYPTIQSFANWLLEGYTEVLSERFDLAAEPVKKNPAEPVIETQAVKVQEEPAGKQIHREDIAVVGMSCRFPGAASLEAYWSLLAEGRSAIRPVPAERWGLKTPYYAGMLDGIHQFDPDFFLLAEEDVKAMDPQALAALEECLNLWYHAGYTPDEIKGEAIGVYLGGRSRHRPGEDKLLDAKNPIVALGQNYLAANLSQYFDMRGPSVVLDTACSSALVGMNMAVQALVSGEIKAAVVGGVSLFESEETHKLFEQRGILSKAQSFHVFDERADGVVLGEGVGMVLLKTVSQAIEDGDSIYAVVKAASVNNDGRTAGPATPSLEAQKSVMKTALEKSGKQPEDITHIEANGSGTVVTDLLELKAIQSVYRSKDAGPLGIGSVKPNIGHPLCAEGIASFIKVVLMLKEKSFIPFLSGEHENTHFDREKANIQFSRTLADWPSPIPAAGINCFADGGTNAHVIVEAWQEDEGRRIKRHPLTPPALNKRLISPDSKEETNEKAAANIWDTYEVEV

SEQ ID NO: 92 - protein, 525 aa, Streptomyces roseosporus
TDDERDRILGDWGSGTHTPLPPRSVAEQIVRRAALDPDAVAVITAEEELSYRELERLSGETARLLADRGIGRESLVAVALPRTAGLVTTLLGVLRTGAAYLPLDTGYPAERLAHVLSDARPDLVLTHAGLAGRLPAGLAPTVLVDEPQPPAAAAPAVPTSPSGDHLAYVIHTSGSTGRPKGVAIAESSLRAFLADAVRRHDLTPHDRLLAVTTVGFDIAGLELFAPLLAGAAIVLADEDAVRDPASITSLCARHHVTVVQATPSWWRAMLDGAPADAAARLEHVRILVGGEPLPADLARVLTATGAAVTNVYGPTEATIWATAAPLTAGDDRTPGIGTPLDNWRVHILDAALGPVPPGVPGEIHIAGSGLARGYLRRPDLTAERFVANPFAPGERMYRTGDLGRFRPDGTLEHLGRVDDQVKVRGFRIELGDVEAALARHPDVGRAAAAVRPDHRGQGRLVAYVVPRPGTRGPDAGELRETVRELLPDYMVPSAQVTLTTLPHTPNGKLDRAALPAPVFGTPAGR

SEQ ID NO: 93 - protein, 5830 aa, Streptomyces roseosporus
MDMQSQRLGVTAAQQSVWLAGQLADDHRLYHCAAYLSLTGSIDPRTLGTAVRRTLDETEALRTRFVPQDGELLQILEPGAGQLLLEADFSGDPDPERAAHDWMHAALAAPVRLDRAGTATHALLTLGPSRHLLYFGYHHIALDGYGALLHLRRLAHVYTALSNGDDPGPCPFGPLAGVLTEEAAYRDSDNHRRDGEFWTRSLAGADEAPGLSEREAGALAVPLRRTVELSGERTEKLAASAAATGARWSSLLVAATAAFVRRHAAADDTVIGLPVTARLTGPALRTPCMLANDVPLRLDARLDAPFAALLADTTRAVGTLARHQRFRGEELHRNLGGVGRTAGLARVTVNVLAYVDNIRFGDCRAVVHELSSGPVRDFHINSYGTPGTPDGVQLVFSGNPALYTATDLADHQERFLRFLDAVTADPDLPTGRHRLLSPGTRARLLDDSRGTERPVPRATLPELFAEQARRTPDAPAVQHDGTVLTYRDLHRSVERAAGRLAGLGLRTEDVVALALPKSAESVAILLGIQRAGAAYVPLDPTHPAERLARVLDDTRPRYLVTTGHIDGLSHPTPQLAAADLLREGGPEPAPGRPAPGNAAYIIQTSGSTGRPKGVVVTHEGLATLAADQIRRYRTGPDARVLQFISPGFDVFVSELSMTLLSGGCLVIPPDGLTGRHLADFLAAEAVTTTSLTPGALATMPATDLPHLRTLIVGGEVCPPEIFDQWGRGRDIVNAYGPTETTVEATAWHRDGATHGPVPLGRPTLNRRGYVLDPALEPVPDGTTGELYLAGEGLARGYVAAPGPTAERFVADPFGPPGSRMYRTGDLVRRRSGGMLEFVGRADGQVKLRGFRIELGEVQAALTALPGVRQAGVLIREDRPGDPRLVGYIVPAPGAEPDAGELRAALARTLPPHMVPWALVPLPALPLTSNGKLDRAALPVPAARAGGSGQRPVTPQEKTLCALFADVLGVTEVATDDVFFELGGHSLNGTRLLARIRTEFGTDLTLRDLFAFPTVAGLLPLLDDNGRQHTTPPLPPRPERLPLSHAQQRLWFLDQVEGPSPAYNIPTAVRLEGPLDIPALAVALQDVTNRHEPLRTLLAEDSEGPHQVILPPEAARPELTHSTVAPGDLAAALAEAARRPFDLAGEIPLKAHLFGCGPDDHTLLLLVHHTAGDGASVEVLVRDLAHAYGARRAGDAPHFEPLPLQYADHTLRRRHLLDDPSDSTQLDHWRDALAGLPEQLELPTDHTRPAVPTRRGEAIAFTVPEHTHHTLRAMAQAHGVTVFMVMQAALAALLSRHGAGHDIPLGTPVAGRSDDGTEDLVGFFVNTLVLRNDVSGDPTFAELVSRVRAANLDAYAYQDVPFERLVDVLKPERSLSWHPLFQIMIAYNGPATNDTADGSRFAGLTSRVHAVHTGMSKFDLSFFLTEHADGLGIDGALEFSTDLFTRITAERLVQRYLTVLEQAAGAPDRPISSYELLGDDERALLAQWNDTAHPTPPGTVLDLLESRAARTPDRPAVVENDHVLTYADLHTRANRLARHLITAHGVGPERLVAVALPRSAELLVALLAVLKTGAAYVPLDLTHPAERTAVVLDDCRPAVILTDAGAARELPRRDIPQLRLDEPEVHAAIAEQPGGPVTDRDRTCVTPVSGEHVAYVIYTSGSTGRPKGVAVEHRSLADFVRYSVTAYPGAFDVTLLHSPVTFDLTVTSLFPPLVVGGAIHVADLTEACPPSLAAAGGPTFVKATPSHLPLLTHEATWAASAKVLLVGGEQLLGRELDKWRAGSPEAVVFNDYGPTEATVNCVDFRIDPGQPIGAGPVAIGRPLRNTRVFVLDGGLRAVPVGVVGELHVAGEGLARGYLGQPGLTAERFVACPFGDAGERMYRTGDLVRWRADGMLEFVGRVDDQVKVRGFRIELGEVEAAVAACPGVDRSVVVVREDRPGDRRLVAYVTAAGDEAEGLAPLIVETAAGRLPGYMVPSAVVVLDEIPLTPNGKVDRAALPAPRVAPAAEFRVTGSPREEALCALFAEVLGVERVGVDDGFFDLGGDSILSIQLVARARRAGLEVSVRDVFEHRTVRALAGVVRESGGVAAAVVDSGVGAVERWPVVEWLAERGGGGLGGAVRAFNQSVVVATPAGITWDELRTVLDAVRERHDAWRLRVVDSGDGAWSLRVDAPAPGGEPDWITRHGMASADLEEQVNAVRAAAVEARSRLDPLTGRMVRAVWLDRGPDRRGVLVLVAHHLVVDGVSWRIVLGDLGEAWTQARAGGHVRLDTVGTSLRGWAAALAEQGRHGARATEANLWAQMVHGSDPLVGPRAVDPSVDVFGVVESVGSRASVGVSRALLTEVPSVLGVGVQEVLLAAFGLAVTRWRGRGGSVVVDVEGHGRNEDAVPGADLSRTVGWFTSIYPVRLPLEPAAWDEIRAGGPAVGRTVREIKECLRTLPDQGLGYGILRYLDPENGPALAQHPTPHFGFNYLGRVSVSADAASLDEGDAHADGLGGLVGGRAAADSDEEQWADWVPVSGPFAVGAGQDPVLPVAHAVEFNAITLDTPDGPRLSVTWSWPTTLLSESRIRELARFWDEALEGLVAHARRPDAGGLTPSDLPLVALDHAELEALQADVTGGVHDILPVSPLQEGLLFHSSFAADGVDVYVGQLTFDLTGPVDADHLHAVVESLVTRHDVLRTGYRQAQSGEWIAVVARQVHTPWQYIHTLDTDADTLTNDERWRPFDMTQGPLARFTLARINDTHFRFIVTYHHVILDGWSVAVLIRELFTTYRDTALGRRPEVPYSPPRRDFMAWLAERDQTAAGQAWRSALAGLAEPTVLALGTEGSGVIPEVLEEEISEELTSELVAWARGRGVTVASVVQAAWALVLGRLVGRDDVVFGLTVSGRPAEVAGVEDMVGLFVNTIPLRARMDPAESLGAFVERLQREQTELLEHQHVRLAEVQRWAGHKELFDVGMVFENYPMDSLLQDSLFHGSGLQIDGIQGADATHFALNLAVVPLPAMRFRLGYRPDVFDAGRVRELWGWIVRALECVVCERDVPVSGVDVLGAGERETLLGWGAGAEPGVRALPGAGAGAGAGLVGLFEERVRTDPDAVAVRGAGVEWSYAELNARANAVARWLIGRGVGPERGVGVVMDRGPDVVAMLLAVAKSGGFYLPVDPQWPTERIDWVLADAGIDLAVVGENLAAAVEAVRDCEVVDYAQIARETRLNEQAATDAGDVTDGERVSALLSGHPLYVIYTSGSTGLPKGVVVTHASVGAYLRRGRNAYRGAADGLGHVHSSLAFDLTVTVLFTPLVSGGCVTLGDLDDTANGLGATFLKATPSHLPLLGQLDRVLAPDATLLLGGEALTAGALHHWRTHHPHTTVINAYGPTELTVNCAEYRIPPGHCLPDGPVPIGRPFTGHHLFVLDPALRLTPPDTIGELYVAGDGLARGYLGRPDLTAERFVACPFRSPGERMYRTGDLARWRSDGTLEFIGRADDQVKIRGFRIELGEVEAAVAAHPHVARAIAVVREDRPGDQRLVAYVTGSDPSGLSSAVTDTVAGRLPAYMVPSAVVVLDQIPLTPNGKVDRAALPAPGTASGTTSRAPGTAREEILCTLFADVLGLDQVGVDEDFFDLGGHSLLATRLTSRIRSALGIDLGVRALFKAPTVGRLDQLLQQQTTSLRAPLVARERTGCEPLSFAQQRLWFLHQLEGPNAAYNIPMALRLTGRLDLTALEAALTDVIARHESLRTVIAQDDSGGVWQNILPTDDTRTHLTLDTMPVDAHTLQNRVDEAARHPFDLTTEIPLRATVFRVTDDEHVLLLVLHHIAGDGWSMAPLAHDLSAAYTVRLEHHAPQLPALAVQYADYAAWQRDVLGTENNTSSQLSTQLDYWYSKLEGLPAELTLPTSRVRPAVASHACDRVEFTVPHDVHQGLTALARTQGATVFMVVQAALAALLSRLGAGTDIPIGTPIAGRTDQAMENLIGLFVNTLVLRTDVSGDPTFAELLARVRTTALDAYAHQDIPFERLVEAINPERSLTRHPLFQVMLAFNNTDRRSALDALDAMPGLHARPADVLAVTSPYDLAFSFVETPGSTEMPGILDYATDLFDRSTAEAMTERLVRLLAEIARRPELSVGDIGILSADEVKALSPEAPPAAEELHTSTLPELFEEQVAARGHAVAVVCEGEELSYKELNARANRLARVLMERGAGPERFVGVALPRGLDLIVALLAVTKTGAAYVPLDPEYPTDRLAYMVTDANPTAVVTSTDVHIPLIAPRIELDDEAIRTELAAAPDTAPCVGSGPAHPAYVIYTSGSTGRPKGVVISHANVVRLFTACSDSFDFGPDHVWTLFHSYAFDFSVWEIWGALLHGGRLVVVPFEVTRSPAEFLALLAEQQVTLLSQTPSAFHQLTEAARQEPARCAGLALRHVVFGGEALDPSRLRDWFDLPLGSRPTLVNMYGITETTVHVTVLPLEDRATSLSGSPIGRPLADLQVYVLDERLRPVPPGTVGEMYVAGAGLARGYLGRPALTAERFVADPNSRSGGRLYRTGDLAKVRPDGGLEYVGRGDRQVKIRGFRIELGEIEAALVTHAGVVQAVVLVRDEQTDDQRLVAHVVPALPHRAPTLAELHEHLAATLPAYMVPSAYRTLDELPLTANGKLDRAALAGQWQGGTRTRRLPRTPQEEILCELFADVLRLPAAGADDDFFALGGHSLLATRLLSAVRGTLGVELGIRDLFAAPTPAGLATVLAASGTALPPVTRIDRRPERLPLSFAQRRLWFLSKLEGPSATYNIPVAVRLTGALDVPALRAALGDVTARHESLRTVFPDDGGEPRQLVLPHAEPPFLTHEVTVGEVAEQAASATGYAFDITSDTPLRATLLRVSPEEHVLVVVIHHIAGDGWSMGPLVRDLVTAYRARTRGDAPEYTPLPVQYADYALWQHAVAGDEDAPDGRTARRLGYWREMLAGLPEEHTLPADRPRPVRSSHRGGRVRFELPAGVHRSLLAVARDRRATLFMVVQAALAGLLSRLGAGDDIPIGTPVAGRGDEALDDVVGFFVNTLVLRTNLAGDPSFADLVDRVRTADLDAFAHQDVPFERLVEALAPRRSLARHPLFQIWYTLTNADQDITGQALNALPGLTGDEYPLGASAAKFDLSFTFTEHRTPDGDAAGLSVLLDYSSDLYDHGTAAALGHRLTGFFAALAADPTAPLGTVPLLTDDERDRILGDWGSGTHTPLPPRSVAEQIVRRAALDPDAVAVITAEEELSYRELERLSGETARLLADRGIGRESLVAVALPRTAGLVTTLLGVLRTGAAYLPLDTGYPAERLAHVLSDARPDLVLTHAGLAGRLPAGLAPTVLVDEPQPPAAAAPAVPTSPSGDHLAYVIHTSGSTGRPKGVAIAESSLRAFLADAVRRHDLTPHDRLLAVTTVGFDIAGLELFAPLLAGAAIVLADEDAVRDPASITSLCARHHVTVVQATPSWWRAMLDGAPADAAARLEHVRILVGGEPLPADLARVLTATGAAVTNVYGPTEATIWATAAPLTAGDDRTPGIGTPLDNWRVHILDAALGPVPPGVPGEIHIAGSGLARGYLRRPDLTAERFVANPFAPGERMYRTGDLGRFRPDGTLEHLGRVDDQVKVRGFRIELGDVEAALARHPDVGRAAAAVRPDHRGQGRLVAYVVPRPGTRGPDAGELRETVRELLPDYMVPSAQVTLTTLPHTPNGKLDRAALPAPVFGTPAGRAPATREEKILAGLFADILGLPDVGADSGFFDLGGDSVLSIQLVSRARREGLHITVRDVFEHGTVGALAAAALPAPADDADDTVPGTDVLPSISDDEFEEFELELGLEGEEEQW

SEQ ID NO: 94 - protein, 521 aa, Streptomyces roseosporus
AGERDQLLHEWNDTAAALPPALLPQLFEEQVRRTPHDVALVSGNIRLTYAELDARANRLAHLLLARGAAPETFVAVALPRTEELLVALLAVQKTGAGHLPLDPGFPAERLSYMLDDARPAVVLTTEDISARIPGGSHVVLDSEQVTGELHDHPATSPAGRGNPAGPAYVIYTSGSTGQPKGVVVPSAALVNFLADMVPRLGLRGGDRLLSVTTVGFDIAALELFVPLLSGATVVLADGETVRDPALARQTCEDHGVTMVQATPSWWHGMLADAGDSLRGVHAVVGGEALSPGLRDALTRGARSVTNMYGPTETTIWSTSAGQAAGDSAPPSIGTPILNTRVYVLDAALCVVPPGVAGELYIAGDGLARGYLGRAGLTAERFVACPFGAPGERMYRTGDLVRWRVDGALEFVGRADDQVKVRGFRVELGEVEGAVAAHPDVVRAVVVVREDRPGDHRLVAYVTGVDTGGLSSAVMRAVAERLPAYMVPSAVVVLDEIPLTPNGKVDRAALPVPGVEAGAGYR

SEQ ID NO: 95 - protein, 7338 aa, Streptomyces roseosporus
MNRRSKVVEEILPVSALQEGLLFHSSFAAADGVDVYAGQLAFDLVGAVDTGRLRAAVESLVARHGVLRSSYRQARSGEWVAVVARRVATPWRAVDARDGATDAAAVAREERWRPFDLGRAPLARFVLVRTDDDRFRFVITYHHVILDGWSLPVLLRELLALYGSGADPSVLPPVRPYGDFLRWAAARDDAAAETAWRDALTGLDEPSLVAPGASPDGVVPASVHAELDKAGTENLAAWARHRGITQATAVRAAWALVLGQHTGRDDVVFGVTVSGRPAELAGAEHMVGLFINTVPLRTVLDPADTLGTFAARLQAEQTTLLEHQHVRLSDIQRWAGHKELFDTIVVFENYPIGHSGPGSIRTDDFTVTATEGSDATHYPLTLTAVPGETLRLKLDHRPDLVDTTTATALLRRVTRVLETATDDTGHTLARLDLLDDDERHRLLRGWNDTTREQPPTYYHQEFEEQARRRPHDTALVFTSTSWTYEELNDRANRLARLLVAAGAGSDDFVALAFPRSAESVVAILAVLKAGAAYLPLDMDQPAERLTGILADAHPTVVLTTTTATPLPHPGRTLVLDSPTTARALAAAPAHNLTDADRRTPLNARNAAYIIHTSGSTGRPKGVVIEHRSLANLFHDHRRALIEPHAAGGSRLKAGLTASLSFDTSWEGLICLAAGHELHLIDDDTRRDAERVAELIDRQRIDVIDVTPSFAQQLVETGILDEGRHHPAAFMLGGEGVDAKLWTRLSDVPGVTSYNYYGPTEFTVDALACTVGIAPRPVIGHPLDNTAAYILDGFLRPVPEGVAGELYLAGTQLARGYAGRPGLTAERFVACPFGAPGERMYRTGDLVRRSPGGVVEYLGRVDDQIKLRGFRIEPAEIELALAGHPAVAQNVVLLHRSATGEARLVAYVVPGTPVDPRELTGHLAARLPAYMVPSAFVLLDTLPLTPNGKLDRGALPEPAFGTAPRPERPRTPVEEILCGLYADVLGLPSFGADDDFFDAGGHSLLASKLVSRIRTNLKTELNVRALFEHRTVSSLATALHRAAQAGPALTAGPRPARIPLSYAQRRLWFLNRLDRDSAAYNMPVALRLRGPLDSTAMCAALTDVAERHEALRTVFEEDRDGAHQIVLPATGLGPLLTVTGADGTTLRALITEFVRRPFDLAAEIPFRAALFRVGDEEHVLVVVLHHIAGDGWSMGPLARDVAEAYRARAAGRAPDWEPLPVQYADYALWQREVLGAEDDETGELSAQLAHWRTRLAGAPAELTLPTDRPRPAVASTAGDRVEFTVPAGLHQALADLARAHGATVFMVVQAALAVLLSRLGAGDDIPIGTPVAGRTDEATEELIGFFVNTLVLRTDVSGDPTFAELLARVRATDLDAYAHQDVPFERLVEVLNPERSLARHPLFQVMLTFNVPDMDGVGSALGNLGELEVSGEAIRTDQTKVDLAFTCTEMYAADGAASGMRGVLEYRLDVFGAVQARETTERLVRVLEGVVSGGGGVSVSGVDVLGVGERERLLGWGVGGPVPVVPGGGLVGLFEERVRADADAVAVRGAGVVWSYGELNARVNVVARWLVGRGVGAECGVGVVMGRGVDVVVMLLAVAKAGGFYVPVDPEWPVERVGWVLADAGVGLVVVGEGLSHVVGDFPGGEVFEFSRVVRESCLVELVAADGVEVRNVTDGERASRLLPGHPLYVVYTSGSTGRPKGVVVTHASVGGYLARGRDVYAGAVGGVGFVHSSLAFDLTVTVLFTPLVSGGCVVLGELDESAQGVGASFVKVTPSHLGLLGELEGVVAGNGMLLVGGEALSGGALREWRERNPGVVVVNAYGPTELTVNCAEFLIAPGEEVPDGPVPIGRPFAGQRMFVLDAALRVVPVGVVGELYVAGVGLARGYLGRAGLTAERFVACPFGAPGERMYRTGDLVRWRVDGALEFVGRADDQVKVRGFRVELGEVEGAVAAHPDVVRAVVVVREDRPGDHRLVAYVTGVDTGGLSSAVMRAVAERLPAYMVPSAVVVLDEIPLTPNGKVDRAALPVPGVEAGAGYRAPVSPREEVLCGLFAEVLGLERVGVDDDFFGLGGHSLLATRLISRVRAVLGVEAGVRALFEAPTVSRLERLLRERSALGVRVPLVARERTGREPLSFAQQRLWFLEELEGPGAAYNIPMALRLAGVLDVEALHQALIDVIARHESLRTLIAQDAGTAWQHILPVDDPRTRPGLPLVDIGADALQERLDEAAGRPFDLAADLPVRATVFRLTDNDHILLVVAHHVAFDAMSRVPFIRNVKRAFEARTNGAAPDWRPLPVQYADYAAWQRDVLGTEDDESSELSAQLAYWRTQLASLPAELALPTDRARPAVASYEGGKVEFTVPAGVYDGLVALARAEGVTVFMVVQAALAALLSRLGAGDDIPIGTPIAGRTDQATEDLIGFFVNTLVLRTDVSGDPTFAELLARVRATDLDAYAHQDIPFERLVEAVNPERSLARHPLFQVMLTFDNTIDREVTEGFAGLGVEGLPLGAGAVKFDLLFGLSEVGGELRGAVEYRCDLFDHPTVAQLAERLVRVLERVASDASVRTGELPVVGEAERARVLTEWNDTGVPGVPETFLELFEAQVAARGDAPAVVYEGEVLSYRELDARANRLAGLLVGRGAGPEHFVGVALPRGLDLIVALLAVLKSGAAYVPLDPEYPAERLVHMVTDAAPVVVVTSTDVRTLRTVPRVELDDEATRATLVAAPATGPDVKMSASHPAYVIYTSGSTGRPKGVVISHGSLANFLAWAREDLGAERLRHVVLSTSLSFDVSVVELFAPLSCGGTVEIVRNLLALVDRPGRWSASLVSGVPSAFAQLLEAGLDRADVGMIALAGEALSARDVRRVRAVLPGARVANFYGPTEATVYATAWYGDTPMDAAAPMGRPLRNTCVYVLDDGLRVVPVGVVGELYVAGVGLARGYLGRVGLTAERFVACPFGARGERMYRTGDLVRWRVDGTLEFVGRADDQVKVRGFRVELGEVEGAVAAHPDVVRAVVVVREDRPGDHRLVAYVTGVDTGGLSSAVMRAVAERLPAYMVPSAVVVLDEIPLTPNGKVDRAGLPVPVVSVAGFCAPSSPREEVLCGLFAEVLGVERVGVDDGFFDLGGDSILSIQLVARARRAGLELSVRDVFEGRTVRALAAVVRGSDAGAVGVVGGAEIVLPGVGEVERWPVVEWLAERGGGSLGGVVRGFNQSVVLAVPAGLVWEELRVLLGAVRDRHEAWRLRVLDSGALCVDGVVPDDGSWIVRCDLSGMGVDGQVDAVRAAAVEARAWLDPSVGRVVRAVWLERGGDRSGVLVLVAHHLVVDGVSWRVVLGDLAEGWAQVRSGGRVELGVVGTSLRGWAAALAEQGRRGERAGEVELWSRMVRGADVLVGSRAVDGAVDVFGGVVSVDSRASVSVSRALLTEVPSVLGVGVQEVLLAAFGLAVARWRGRGGPVVVDVEGHGRNEDAVRGADLSRTVGWFTSVYPVRVPVESASWDEVRAGGPVVGRVVREVKETLRSLPDQGLGYGILRYLDPEHGPALARHATPQFGFNYLGRFTTGTDDTGDEGMTDWVPVSGPFAVGAGQDPELPVAHAVEFNAITLDTPEGPRLGVTWSWPTTLLPESRIRELARYWDEALEGLVEHARHPEAGGLTPSDVTLVEVNQVELDRLQAGVAGGAEEILPVSALQEGLLFHSALASGGVDVYVGQLVFDLVGPVDVDRLRAAVEGLVARHGVLRSGYRQLRSGEWVAVVARQVDLPWQSIDVRDGGIDGLVEEERWRRFDMGRGPLARFVLIRTHDDRFRFVITYHHVVLDGWSVPVLLRELLALYGSSGDVSVLPGVRSYGDFLRWVAARDAAAAEGAWRRALTGLEEPSLVAPGVSRDGVVPAAFHGAVDGDLSQKIVAWARGRGVTVASVVQAAWALVLGRLMGRDDVVFGVTVSGRPAEVVGVEDMVGLFVNTIPLRARLDPAESLGGFVERLQREQTELLEHQHVRLAEVQRWAGHKELFDVGMVFDNYPVSSESPEAEFQISRTGGYNGTHYALNLVASMHGLELELEIGYRPDVFDAGRVREVWGWLVRVLEGVVSGGGGVSVSGVDVLGVGERERLLGWGVGGPVPVVPGGGLVGLFEERVRADADAVAVRGAGVVWSYGELNARVNVVARWLVGRGVGAECGVGVVMGRGVDVVVMLLAVAKAGGFYVPVDPEWPVERVGWVLADAGVGLVVVGEGLSHVVGDFPGGEVFEFSRVVRESCLVELVAADGVEVRNVTDGERASRLLPGHPLYVVYTSGSTGRPKGVVVTHASVGGYLARGRDVYAGAVGGVGFVHSSLAFDLTVTVLFTPLVSGGCVVLGELDESAQGVGASFVKVTPSHLGLLGELEGVVAGNGMLLVGGEALSGGALREWRERNPGVVVVNAYGPTELTVNCAEFLIAPGEEVPDGPVPIGRPFAGQRMFVLDAALRVVPVGVVGELYVAGVGLARGYLGRVGLTAERFVACPFGVPGERMYRTGDLVRWRVDGALEFVGRADDQVKVRGFRVELGEVEGAVAAHPDVVRAVVVVREDRPGDHRLVAYVTAGGVGGDGLRSAISGLVAERLPAYMVPSAVVVLDEIPLTPNGKVDRAALPVPEVEAGTGYRAPVSPREEVLCGLFAEVLGVERVGVDDDFFELGGHSLLATRLISRVRAVLGVEAGVRALFEAPTVSRLERLLRERSGLGVRVPLVARERTGREPLSFAQQRLWFLEELEGPGAAYNIPMALRLAGVLDVEALHQALIDVIARHESLRTLIAQDAGTAWQHILPVDDPRTRPGLPLVDIGADALQERLDEAAGRPFDLAADLPVRATVFRLTDNDHILLLVLHHIAGDGWSMGPLARDLSTAYSARAAGAASAWRPLSVQYADYAAWQRDVLGTEDDESSELSAQLAYWRTQLASLPAELALPTDRARPAVATYRGGRIEFTIPADVHRSLADLARAEGVTVFMVVQAALAALLSRLGAGDDIPIGTPIAGRTDQATEDLIGFFVNTLVLRTDVSGDPTFAELLARVRATDLDAYAHQDIPFERLVEAVNPERSLARHPLFQVMLAFNNAETSTPLPMAEGLAASRQDIEPGVAKFDLALYCNESRGETGDHQGIRSVFEYRRDLWDEDTVRQLADRFLHVLAAFAAAPEQRASSVDVLRAGERDQLLHEWNDTAAALPPALLPQLFEEQVRRTPHDVALVSGNIRLTYAELDARANRLAHLLLARGAAPETFVAVALPRTEELLVALLAVQKTGAGHLPLDPGFPAERLSYMLDDARPAVVLTTEDISARIPGGSHVVLDSEQVTGELHDHPATSPAGRGNPAGPAYVIYTSGSTGQPKGVVVPSAALVNFLADMVPRLGLRGGDRLLSVTTVGFDIAALELFVPLLSGATVVLADGETVRDPALARQTCEDHGVTMVQATPSWWHGMLADAGDSLRGVHAVVGGEALSPGLRDALTRGARSVTNMYGPTETTIWSTSAGQAAGDSAPPSIGTPILNTRVYVLDAALCVVPPGVAGELYIAGDGLARGYLGRAGLTAERFVACPFGAPGERMYRTGDLVRWRVDGALEFVGRADDQVKVRGFRVELGEVEGAVAAHPDVVRAVVVVREDRPGDHRLVAYVTGVDTGGLSSAVMRAVAERLPAYMVPSAVVVLDEIPLTPNGKVDRAALPVPGVEAGAGYRAPVSPREEVLCGLFAEVLGVERVGVDDDFFGLGGHSLLATRLISRVRAVLGVEAGVRALFEAPTVSRLERLLRERSGLGVRVPLVARERTGREPLSFAQQRLWFLEELEGPGAAYNIPMALRLAGVLDVEALHQALIDVIARHESLRTLIARDSDGTARQQVLPVGDPAARPALPVVQTDADTLVAKLNEAVGRPFDLTAEMPLRATVFRVADEDHALLLVFHHIAGDGWSTGLLARDLSTAYAARLEGRDPQLPPLPVQYADYAAWQRDVLGTEDDESSELSAQLAYWRTQLADLPAELALPADRVRPARASYEGGRVGFTVPAGVLRDLTRLARVEGVTVFMVVQAALAALLSRLGAGDDIPIGTPIAGRTDQATEDLIGFFVNTLVLRTDVSGDPTFAELLARVRATDLDAYAHQDIPFERLVEAVNPERSLARHPLFQVMLAFDNTADGGPVEDFPGLSAAGLPLGAGAAKFDLLFGLSEVGGELRGAVEYRCDLFDHPTAARIAERLVRVLERVAADASVRLGELPVVSDAERACVLTEWNDTAVPGVTGTLSALFEARAAARGDAPAVVYEGEELSYRELNTRANRLAHVLAEHGAGPERFVGVALPRSPDLVVALLAVVKSGAAYVPLDPEYPADRLAYMAGDAAPVAVLTRGDVELPGSVPRIGLDDTEIRATLATAPGTNPGTPVTEAHPAYMIYTSGSTGRPKGVVVSHGAIVNRLAWMQAEYRLDATDRVLQKTPAGFDVSVWEFFWPLLEGAVLVFARPGGHRDAAYLAGLIERERITTAHFVPSMLRVFLEEPGAALCTGLRRVICSGEALGTDLAVDFRAKLPVPLHNLYGPTEAAVDVTHHAYEPATGTATVPIGRPIWNIRTYVLDAALRPVPPGVPGELYLAGAGLARGYHGRPALTAERFVACPFGVPGERMYRTGDLVRWRVDGTLEFVGRADDQVKVRGFRVELGEVEGAVAAHPDVVRAVVVVREDRPGDHRLVAYVTVGGVGGDGLRSAISGLVAERLPAYMVPSAVVVLDEIPLTPNGKVDRAGLPVPVVSVAGFCAPSSPREEVLCGLFAEVLGVERVGVDDGFFDLGGDSILSIQLVARARRAGLELSVRDVFEGRTVRALAAVVRGSDAGAVGVVGGAEIVLPGVGEVERWPVVEWLAERGGGSLGGVVRGFNQSVVLAVPAGLVWEELRVLLGAVRDRHEAWRLRVLDSGALCVDGVVPDDGSWIVRCDLSGMGVDGQVDAVRAAAVEARAWLDPSVGRVVRAVWLERGGDRSGVLVLVAHHLVVDGVSWRVVLGDLAEGWAQVRSGGRVELGVVGTSLRGWAAALAEQGRRGERAGEVELWSRMVRGADVLVGSRAVDGAVDVFGGVVSVDSRASVSVSRALLTEVPSVLGVGVQEVLLAAFGLAVARWRGRGGPVVVDVEGHGRNEDAVRGADLSRTVGWFTSVYPVRVPVESASWDEVRAGGPVVGRVVREVKETLRSLPDQGLGYGILRYLDPEHGPALARHATPQFGFNYLGRFTTGTDETTTADALDRAPAWSLLARSAAGQDPELPVAHAVEFNAITLDTPEGPRLGVTWSWPTTLLPESRIRELARYWDEALEGLVEHARHPEAGGLTPSDVGLAELSFAEIELLEDDWRTQG

SEQ ID NO: 96 - protein, 9 aa, Bacillus subtilis
NVEKAGIFD

SEQ ID NO: 97 - protein, 60 aa, Artificial Sequence
  Description of Artificial Sequence: Synthetic polypeptide
KQETIERWKQYWMELLDAVTGNPNQPLSSLSLVTETEKQALLEAWKGKALPVPTDKTVHQ

SEQ ID NO: 98 - protein, 60 aa, Artificial Sequence
  Description of Artificial Sequence: Synthetic polypeptide
AKETAEKWSEYVLRLLKAVADNPNQPLSSLLLVTETEKQALLEAWKGKALPVPTDKTVHQ

SEQ ID NO: 99 - protein, 57 aa, Artificial Sequence
  Description of Artificial Sequence: Synthetic polypeptide
KDETIRRWSRHFVNIIKAAAANPNVRLSDVDLLSSAETAALLEERHMTQITEATFAA

SEQ ID NO: 100 - protein, 60 aa, Artificial Sequence
  Description of Artificial Sequence: Synthetic polypeptide
KQSTADRLLTHFARLLEDAAADPEKPISEYKLLSEEEAASQIQQFNPGRTPYPKDKTIVQ

SEQ ID NO: 101 - protein, 60 aa, Artificial Sequence
  Description of Artificial Sequence: Synthetic polypeptide
SREEINMICERMITMLENALTHPEHTIDELTLISDAEKEKLLARAGGKSVSYRKDMTIPE

SEQ ID NO: 102 - protein, 59 aa, Artificial Sequence
  Description of Artificial Sequence: Synthetic polypeptide
SESDIKLHQQRILQLLQTASAGEDMLIGQMELLLPEEKEKVISKWNETAKSEKLVSLQD

SEQ ID NO: 103 - protein, 59 aa, Artificial Sequence
  Description of Artificial Sequence: Synthetic polypeptide
DAASISAMFDHFVYVTEQAMLNPSQPLKEYSLLPEAEKQMILKTWNATGKTYPYITFHE

SEQ ID NO: 104 - protein, 60 aa, Artificial Sequence
  Description of Artificial Sequence: Synthetic polypeptide
DSAFIERTAEHLTRMMEAAVDQPAAFVREYGLVGDEEQRQIVEVFNSTKAELPEGMAVHQ

SEQ ID NO: 105 - protein, 59 aa, Artificial Sequence
  Description of Artificial Sequence: Synthetic polypeptide
DEAFILRLKSQLLTAIQQLIQNPDQPVSTINLVDDREREFLLTGLNPPAQAHETKPLTY

SEQ ID NO: 106 - protein, 58 aa, Artificial Sequence
  Description of Artificial Sequence: Synthetic polypeptide
RKALPAPDFSTSVSDRAPRTPQEEILCDLFAEVLGLARVGIDDSFFELGGHSLLAARL

SEQ ID NO: 107 - protein, 58 aa, Artificial Sequence
  Description of Artificial Sequence: Synthetic polypeptide
RKALPAPDFAAAVTGRGPRTPQEEILCDLFMEVLHLPRVGIDDRFFDLGGHSLLAVQL

SEQ ID NO: 108 - protein, 60 aa, Artificial Sequence
  Description of Artificial Sequence: Synthetic polypeptide
RRALPIPDANVSRGVSYVAPRNGTEQKVADIWAQVLQAEQVGAYDHFFDIGGHSLAGMKM

SEQ ID NO: 109 - protein, 59 aa, Artificial Sequence
  Description of Artificial Sequence: Synthetic polypeptide
KRLLPKPDQDQLAEEWIGPRNEMEETIAQIWSEVLGRKQIGIHDDFFALGGHSLKAMTA

SEQ ID NO: 110 - protein, 58 aa, Artificial Sequence
  Description of Artificial Sequence: Synthetic polypeptide
KKELPAPQSEAVQPEYAAPKTESEKKLAEIWEGILGVKAGVTDNFFMIGGHSLKAMMM

SEQ ID NO: 111 - protein, 60 aa, Artificial Sequence
  Description of Artificial Sequence: Synthetic polypeptide
RRKLFALEVKAVSGTAYTAPRNETEKAIAAIWQDVLNVEKAGIFDNFFETGGHSLKAMTL

SEQ ID NO: 112 - protein, 59 aa, Artificial Sequence
  Description of Artificial Sequence: Synthetic polypeptide
RKALPEPDIEAGSGEYKAPTTDMEELLAGIWQDVLGMSEVGVTDNFFSLGGDSIKGIQM

SEQ ID NO: 113 - protein, 59 aa, Artificial Sequence; identical to SEQ ID NO: 112
  Description of Artificial Sequence: Synthetic polypeptide

SEQ ID NO: 114 - protein, 60 aa, Artificial Sequence
  Description of Artificial Sequence: Synthetic polypeptide
RNALPKPNAAQSGGKALAAPETALEESLCRIWQKTLGIEAIGIDDNFFDLGGHSLKGMML

SEQ ID NO: 115 - protein, 60 aa, Artificial Sequence
  Description of Artificial Sequence: Synthetic polypeptide
RNSLKNIDLSGEQLKQRQTSPKNIQDTVFTIWQEVLKTSDIEWDDGFFDVGGDSLLAVTV

What is claimed is:

1. A metabolically-engineered microorganism capable of synthesizing an N-acylglycine biosurfactant, comprising a chimeric fusion protein.

2. The metabolically-engineered microorganism of claim 1, wherein the chimeric fusion protein comprises a glycine adenylation domain operably linked to a condensation domain, a peptidyl carrier protein domain, a thioesterase domain, and the type II TE domain.

3. The metabolically-engineered microorganism of claim 2, wherein the glycine adenylation domain is selected from the group consisting of a DhbF protein of SEQ ID NO:10 and a PksJ protein of SEQ ID NO:12.

4. The metabolically-engineered microorganism of claim 2, wherein the glycine adenylation domain protein motif comprises a glycine adenylation domain protein motif selected from the group consisting of SEQ ID NO:40, SEQ ID NO:41, SEQ ID NO:42, SEQ ID NO:89, and SEQ ID NO:1.

5. The metabolically-engineered microorganism of claim 2, wherein the glycine adenylation domain comprises a glycine adenylation domain from the DhbF protein of SEQ ID NO:9 or the PksJ protein of SEQ ID NO:11.

6. The metabolically-engineered microorganism of claim 2, wherein the condensation domain, the peptidyl carrier protein domain, the thioesterase domain, and the type II TE domain are encoded by the surfactin gene cluster.

7. The metabolically-engineered microorganism of claim 6, wherein the surfactin gene cluster is selected from the group consisting of SrfAA-M3 (SEQ ID NO:4), SrfAA-M2 (SEQ ID NO:3), SrfAA-M1 (SEQ ID NO:2), SrfAB-M6 (SEQ ID NO:7), SrfAB-M5 (SEQ ID NO:6), SrfAB-M4 (SEQ ID NO:5), and SrfAC-M7 (SEQ ID NO:8).

8. The metabolically-engineered microorganism of claim 2, wherein the glycine adenylation domain is operably linked to the condensation domain at the amino acid sequence of SDAEKQM (SEQ ID NO: 53) or TLISDAEK (SEQ ID NO: 54), wherein E comprises the junction between the glycine adenylation domain and the condensation domain.

9. The metabolically-engineered microorganism of claim 2, wherein the glycine adenylation domain is operably linked to the peptidyl carrier protein domain at the amino acid sequence of WQEVLNVEKAGIF (SEQ ID NO: 57), wherein N comprises the junction between the glycine adenylation domain and the peptidyl carrier protein domain.

10. The metabolically-engineered microorganism of claim 2, wherein the glycine adenylation domain is operably linked to the peptidyl carrier protein domain at the amino acid sequence of RVGIDDDFFALG (SEQ ID NO: 56) or IEWDDDFFAL (SEQ ID NO: 55), wherein the third D comprises the junction between the glycine adenylation domain and the peptidyl carrier protein domain.

11. The metabolically-engineered microorganism of claim 1, wherein the microorganism is a gram (−) or a gram (+) bacteria.

12. The metabolically-engineered microorganism of claim 11, wherein the gram (+) bacteria is Bacillus subtilis.

13. The metabolically-engineered microorganism of claim 11, wherein the gram (−) bacteria Escherichia coli.

14. The metabolically-engineered microorganism of claim 1, wherein a polynucleotide encoding the chimeric fusion protein is expressed by a bacterial promoter.

15. The metabolically-engineered microorganism of claim 14, wherein the bacterial promoter comprises a PsrfA bacterial promoter.

16. The metabolically-engineered microorganism of claim 1, wherein a polynucleotide encoding the chimeric fusion protein is integrated within a genomic locus of the microorganism.

17. The metabolically-engineered microorganism of claim 16, wherein the genomic locus comprises an amyE genomic locus.

18. The metabolically-engineered microorganism of claim 16, wherein the integration comprises a homologous recombination mediated integration.

19. The metabolically-engineered microorganism of claim 1, wherein the expression of the chimeric fusion protein results in the synthesis of N-acylglycine from medium chain length β-hydroxy fatty acids.

20. The metabolically-engineered microorganism as in any of claims 1-19, in which the chimeric fusion protein is selected from the group consisting of a polynucleotide with at least 90% sequence identity to ME-B0004 (SEQ ID NO:15), ME-B0007 (SEQ ID NO:13), and ME-B0008 (SEQ ID NO:14).

21. A method for producing N-acylglycine from a microorganism, the method comprising;
a. providing a microorganism comprising a chimeric fusion protein of claim 1;
b. culturing the microorganism to produce medium chain length β-hydroxy fatty acids;
c. expressing the chimeric fusion protein, wherein the expression of the chimeric fusion protein synthesizes N-acylglycine from the medium chain length β-hydroxy fatty acids; and,
d. purifying the N-acylglycine from the microorganism to produce the N-acylglycine.

22. A method for fermenting N-acylglycine within a microorganism, the method comprising;
a. fermenting a microorganism comprising a chimeric fusion protein of claim 1;
b. expressing the chimeric fusion protein, wherein the expression of the chimeric fusion protein synthesizes N-acylglycine from a medium chain length β-hydroxy fatty acids; and,
c. fermenting N-acylglycine within the microorganism.

23. A chimeric polynucleotide sequence comprising a glycine adenylation domain.

24. The chimeric polynucleotide sequence of claim 23, wherein the glycine adenylation domain is selected from the group consisting of:
a. a polynucleotide motif comprising a glycine adenylation domain motif of SEQ ID NO:40, SEQ ID NO:41, SEQ ID NO:42, or SEQ ID NO:1;
b. a polynucleotide comprising at least 90% sequence identity to the polynucleotide of SEQ ID NO:49, or SEQ ID NO:52;
c. a polynucleotide encoding a polypeptide comprising at least 90% sequence identity to SEQ ID NO:10, SEQ ID NO:12, SEQ ID NO:58, SEQ ID NO:59, SEQ ID NO:60, SEQ ID NO:61, SEQ ID NO:62, SEQ ID NO:63, SEQ ID NO:64, SEQ ID NO:65, or SEQ ID NO:66; and,
d. a polynucleotide of a coding sequence comprising a glycine adenylation domain of Table 1.

25. The chimeric polynucleotide sequence of claim 23, the glycine adenylation domain operably linked to a condensation domain.

26. The chimeric polynucleotide sequence of claim 25, the condensation domain comprising a polynucleotide with at least 90% sequence identity to SEQ ID NO:50.

27. The chimeric polynucleotide sequence of claim 25, the condensation domain comprising a polynucleotide encoding a polypeptide with at least 90% sequence identity to SEQ ID NO:67, SEQ ID NO:68, SEQ ID NO:69, SEQ ID NO:70, SEQ ID NO:71, SEQ ID NO:72, SEQ ID NO:73, SEQ ID NO:74, SEQ ID NO:75, or SEQ ID NO:76.

28. The chimeric polynucleotide sequence of claim 23, the glycine adenylation domain operably linked to a peptidyl carrier protein domain.

29. The chimeric polynucleotide sequence of claim 28, the peptidyl carrier protein domain comprising a polynucleotide with at least 90% sequence identity to SEQ ID NO:51.

30. The chimeric polynucleotide sequence of claim 28, the peptidyl carrier protein domain comprising a polynucleotide encoding a polypeptide with at least 90% sequence identity to SEQ ID NO:77, SEQ ID NO:78, SEQ ID NO:79, SEQ ID NO:80, SEQ ID NO:81, SEQ ID NO:82, SEQ ID NO:83, SEQ ID NO:84, SEQ ID NO:85, or SEQ ID NO:86.

31. The chimeric polynucleotide sequence of claim 23, the glycine adenylation domain operably linked to a thioesterase domain.

32. The chimeric polynucleotide sequence of claim 31, the thioesterase domain comprising a polynucleotide with at least 90% sequence identity to SEQ ID NO:51.

33. The chimeric polynucleotide sequence of claim 31, the thioesterase domain comprising a polynucleotide encoding a polypeptide with at least 90% sequence identity to SEQ ID NO:87, or SEQ ID NO:88.

34. The chimeric polynucleotide sequence of claim 23, the chimeric polynucleotide sequence comprising a NRPS fusion gene construct of a polypeptide with at least 90% sequence identity to SEQ ID NO:13, SEQ ID NO:14, or SEQ ID NO:15.

35. The chimeric polynucleotide sequence of claim 34, the expression of the NRPS fusion gene construct synthesizing N-acylglycine from a medium chain length β-hydroxy fatty acid.

36. The chimeric polynucleotide sequence of any of claims 23-35, the glycine adenylation domain transformed into a bacterial microorganism.

37. The chimeric polynucleotide sequence of claim 36, the bacterial microorganism synthesizing an N-acylglycine biosurfactant from a medium chain length β-hydroxy fatty acid.
